(19) United States
(12) Patent Application Publication
(10) Pub. No.: US 2024/0327515 A1
(43) Pub. Date: Oct. 3, 2024

(54) ANTI-CD3 ANTIBODIES

(71) Applicant: iBio, Inc., Bryan, TX (US)

(72) Inventors: Matthew P. Greving, Rancho Santa Fe, CA (US); Alexander Tomoaki Taguchi, San Diego, CA (US); Cody Allen Moore, San Diego, CA (US); Hari Hara S. Potula, Freemont, CA (US); Gao Liu, Brisbane, CA (US)

(21) Appl. No.: 18/619,648

(22) Filed: Mar. 28, 2024

Related U.S. Application Data
(60) Provisional application No. 63/456,240, filed on Mar. 31, 2023.

(51) Int. Cl. C07K 16/28

(52) U.S. Cl. CPC C07K 16/2809; C07K 2317/24; C07K 2317/31; C07K 2317/35; C07K 2317/622; C07K 2317/626

(57) ABSTRACT

Provided herein are novel human anti-CD3 antigen-binding polypeptides, treatments, nucleic acids, vectors, their preparation and their use in the treatment and/or diagnosis of various diseases, and also relates to bispecific antibody molecules capable of activating immune effector cells and their use in diagnosis and/or treatment of various diseases.

### CROSS-REFERENCE TO RELATED APPLICATIONS

[0001] This application claims priority to U.S. Provisional Application Ser. No. 63/456,240, filed Mar. 31, 2023, and, the entire contents of which are incorporated herein by reference.

### TECHNICAL FIELD OF THE INVENTION

[0002] This document relates to materials and methods for triggering an immune response, and particularly to the use of novel anti-CD3 antibodies to trigger immune activation or tolerance, and to treat autoimmune diseases, cancer, antimicrobial, antiviral, and other immune responses.

### INCORPORATION-BY-REFERENCE OF MATERIALS FILED ON COMPACT DISC

[0003] The application contains a Sequence Listing which has been submitted electronically in .XML format and is hereby incorporated by reference in its entirety. Said .XML copy, created on Mar. 27, 2024, is named “IBIO1040.xml” and is 2,893,154 bytes in size. The sequence listing contained in this .XML file is part of the specification and is hereby incorporated by reference herein in its entirety.

### BACKGROUND OF THE INVENTION

[0004] Without limiting the scope of the invention, its background is described in connection with anti-CD3 antibodies.

[0005] Such antibodies are taught by Jishage, et al., in U.S. Pat. No. 11,612,149, entitled, “Non-human Animal Having Human CD3 Gene Substituted For Endogenous CD3 Gene”. These inventors are said to teach genetically modified non-human animals that are deficient in at least one or more types of CD3 genes selected from the group consisting of endogenous CD3ε, CD3δ, and CD3γ in its genome and then functionally express at least one or more types of human CD3 genes selected from the group consisting of human CD3ε, CD3δ, and CD3γ. The genetically modified non-human animals are said to provide mature T cell differentiation and production, and immunocompetent cells including T cells.

[0006] Additional antibodies are taught by Van Den Brink, et al., in U.S. Pat. No. 11,613,575, entitled, “Humanized Or Chimeric CD3 Antibodies”. These inventors are said to teach humanized or chimeric antibodies binding CD3, bispecific antibodies, compositions, pharmaceutical compositions, use of the antibodies in the treatment of a disease, and method of treatment.

[0007] Finally, other antibodies are taught by Granada, et al., in U.S. Patent Publication No 20230037682, entitled, “BINDING MOLECULES AGAINST CD3 AND USES THEREOF”. These applicants are said to teach binding molecules that specifically bind to CD3, such as monospecific binding molecules that specifically bind to CD3 and multi-specific binding molecules (MBMs) that specifically bind to CD3 and a tumor-associated antigen, conjugates comprising the CD3 binding molecules, and pharmaceutical compositions comprising the CD3 binding molecules and conjugates. They are further said to teach methods of using the CD3 binding molecules, conjugates, and pharmaceutical compositions to activate T cells in a subject, for example a subject having a cancer or autoimmune disease, recombinant host cells engineered, and methods of producing the CD3 binding molecules by culturing the host cells under conditions in which the CD3 binding molecules are expressed.

[0008] Despite these advances, novel anti-CD3 antibodies are needed that have unique binding characteristics, target specific epitopes, and can be used for treating cancer or autoimmune diseases.

### SUMMARY OF THE INVENTION

[0009] As embodied and broadly described herein, an aspect of the present disclosure relates to an anti-CD3 antibody, wherein the antibody comprises: a heavy chain variable domain (VH) complementarity determining region 1 (CDR1) comprising the amino acid sequence of any one of the following SEQ ID NOs: 1, 11, 21, 31, 41, 51, 61, 71, 81, 91, 101, 111, 121, 131, 141, 151, 161, 171, 181, 191, 201, 211, 221, 231, 241, 251, 261, 271, 281, 291, 301, 311, 321, 331, 341, 351, 361, 371, 381, 391, 401, 411, 421, 431, 441, 451, 461, 471, 481, 491, 501, 511, 521, 531, 541, 551, 561, 571, 581, 591, 601, 611, 621, 631, 641, 651, 661, 671, 681, 691, 701, 711, 721, 731, 741, 751, 761, 771, 781, 791, 801, 811, 821, 831, 841, 851, 861, 871, 881, 891, 901, 911, 921, 931, 941, 951, 961, 971, 981, 991, 1001, 1011, 1021, 1031, 1041, 1051, 1061, 1071, 1081, 1091, 1101, 1111, 1121, 1131, 1141, 1151, 1161, 1171, 1181, 1191, 1201, 1211, 1221, 1231, 1241, 1251, 1261, 1271, 1281, 1291, 1301, 1311, 1321, 1331, 1341, 1351, 1361, 1371, 1381, 1391, 1401, 1411, 1421, 1431, 1441, 1451, 1461, 1471, 1481, 1491, 1501, 1511, 1521, 1531, 1541, 1551, 1561, 1571, 1581, 1591, 1601, 1611, 1621, 1631, 1641, 1651, 1661, 1671, 1681, 1691, 1701, 1711, 1721, 1731, 1741, 1751, 1761, 1771, 1781, 1791, 1801, 1811, 1821, 1831, 1841, 1851, 1861, 1871, 1881, 1891, 1901, 1911, 1916, 1921, 1926, 1931, 1936, 1941, 1946, 1951, 1956, 1961, 1966, 1971, 1976, 1981, 1986, 1991, 1996, 2001, 2006, 2011, 2016, 2021, 2026, 2031, 2036, 2041, 2046, 2051, 2056, 2061, 2066, 2071, 2076, 2081, 2086, 2091, 2096, 2101, 2106, 2111, 2116, 2121, 2126, 2131, 2136, 2141, 2146, 2151, 2156, 2161, 2166, 2171, 2176, 2181, or 2186; and a VH CDR2 comprising the amino acid sequence of any one of the following SEQ ID NOs: 2, 12, 22, 32, 42, 52, 62, 72, 82, 92, 102, 112, 122, 132, 142, 152, 162, 172, 182, 192, 202, 212, 222, 232, 242, 252, 262, 272, 282, 292, 302, 312, 322, 332, 342, 352, 362, 372, 382, 392, 402, 412, 422, 432, 442, 452, 462, 472, 482, 492, 502, 512, 522, 532, 542, 552, 562, 572, 582, 592, 602, 612, 622, 632, 642, 652, 662, 672, 682, 692, 702, 712, 722, 732, 742, 752, 762, 772, 782, 792, 802, 812, 822, 832, 842, 852, 862, 872, 882, 892, 902, 912, 922, 932, 942, 952, 962, 972, 982, 992, 1002, 1012, 1022, 1032, 1042, 1052, 1062, 1072, 1082, 1092, 1102, 1112, 1122, 1132, 1142, 1152, 1162, 1172, 1182, 1192, 1202, 1212, 1222, 1232, 1242, 1252, 1262, 1272, 1282, 1292, 1302, 1312, 1322, 1332, 1342, 1352, 1362, 1372, 1382, 1392, 1402, 1412, 1422, 1432, 1442, 1452, 1462, 1472, 1482, 1492, 1502, 1512, 1522, 1532, 1542, 1552, 1562, 1572, 1582, 1592, 1602, 1612, 1622, 1632, 1642, 1652, 1662, 1672, 1682, 1692, 1702, 1712, 1722, 1732, 1742, 1752, 1762, 1772, 1782, 1792, 1802, 1812, 1822, 1832, 1842, 1852, 1862, 1872, 1882, 1892, 1902, 1912, 1917, 1922, 1927, 1932, 1937, 1942, 1947, 1952, 1957, 1962, 1967, 1972, 1977, 1982, 1987, 1992, 1997, 2002, 2007, 2012, 2017, 2022, 2027, 2032, 2037, 2042, 2047, 2052, 2057, 2062, 2067, 2072, 2077, 2082, 2087, 2092, 2097, 2102, 2107, 2112, 2117, 2122, 2127, 2132, 2137, 2142, 2147, 2152, 2157, 2162, 2167, 2172, 2177, 2182, or 2187; and a VH CDR3 comprising the amino acid sequence of any one of the following SEQ ID NOs: 3, 13, 23, 33, 43, 53, 63, 73, 83, 93, 103, 113, 123, 133, 143, 153, 163, 173, 183, 193, 203, 213, 223, 233, 243, 253, 263, 273, 283, 293, 303, 313, 323, 333, 343, 353, 363, 373, 383, 393, 403, 413, 423, 433, 443, 453, 463, 473, 483, 493, 503, 513, 523, 533, 543, 553, 563, 573, 583, 593, 603, 613, 623, 633, 643, 653, 663, 673, 683, 693, 703, 713, 723, 733, 743, 753, 763, 773, 783, 793, 803, 813, 823, 833, 843, 853, 863, 873, 883, 893, 903, 913, 923, 933, 943, 953, 963, 973, 983, 993, 1003, 1013, 1023, 1033, 1043, 1053, 1063, 1073, 1083, 1093, 1103, 1113, 1123, 1133, 1143, 1153, 1163, 1173, 1183, 1193, 1203, 1213, 1223, 1233, 1243, 1253, 1263, 1273, 1283, 1293, 1303, 1313, 1323, 1333, 1343, 1353, 1363, 1373, 1383, 1393, 1403, 1413, 1423, 1433, 1443, 1453, 1463, 1473, 1483, 1493, 1503, 1513, 1523, 1533, 1543, 1553, 1563, 1573, 1583, 1593, 1603, 1613, 1623, 1633, 1643, 1653, 1663, 1673, 1683, 1693, 1703, 1713, 1723, 1733, 1743, 1753, 1763, 1773, 1783, 1793, 1803, 1813, 1823, 1833, 1843, 1853, 1863, 1873, 1883, 1893, 1903, 1913, 1918, 1923, 1928, 1933, 1938, 1943, 1948, 1953, 1958, 1963, 1968, 1973, 1978, 1983, 1988, 1993, 1998, 2003, 2008, 2013, 2018, 2023, 2028, 2033, 2038, 2043, 2048, 2053, 2058, 2063, 2068, 2073, 2078, 2083, 2088, 2093, 2098, 2103, 2108, 2113, 2118, 2123, 2128, 2133, 2138, 2143, 2148, 2153, 2158, 2163, 2168, 2173, 2178, 2183, or 2188; and a light chain variable domain (VL) CDR1 comprising the amino acid sequence of any one of the following SEQ ID NOs: 6, 16, 26, 36, 46, 56, 66, 76, 86, 96, 106, 116, 126, 136, 146, 156, 166, 176, 186, 196, 206, 216, 226, 236, 246, 256, 266, 276, 286, 296, 306, 316, 326, 336, 346, 356, 366, 376, 386, 396, 406, 416, 426, 436, 446, 456, 466, 476, 486, 496, 506, 516, 526, 536, 546, 556, 566, 576, 586, 596, 606, 616, 626, 636, 646, 656, 666, 676, 686, 696, 706, 716, 726, 736, 746, 756, 766, 776, 786, 796, 806, 816, 826, 836, 846, 856, 866, 876, 886, 896, 906, 916, 926, 936, 946, 956, 966, 976, 986, 996, 1006, 1016, 1026, 1036, 1046, 1056, 1066, 1076, 1086, 1096, 1106, 1116, 1126, 1136, 1146, 1156, 1166, 1176, 1186, 1196, 1206, 1216, 1226, 1236, 1246, 1256, 1266, 1276, 1286, 1296, 1306, 1316, 1326, 1336, 1346, 1356, 1366, 1376, 1386, 1396, 1406, 1416, 1426, 1436, 1446, 1456, 1466, 1476, 1486, 1496, 1506, 1516, 1526, 1536, 1546, 1556, 1566, 1576, 1586, 1596, 1606, 1616, 1626, 1636, 1646, 1656, 1666, 1676, 1686, 1696, 1706, 1716, 1726, 1736, 1746, 1756, 1766, 1776, 1786, 1796, 1806, 1816, 1826, 1836, 1846, 1856, 1866, 1876, 1886, 1896, 1906, 2161, 2166, 2171, 2176, 2181, 2186, 2191, 2196, 2201, 2206, 2211, 2216, 2221, 2226, 2231, 2236, 2241, 2246, 2251, 2256, 2261, 2266, 2271, 2276, 2281, 2286, 2291, 2296, 2301, 2306, 2311, 2316, 2321, 2326, 2331, or 2336; and a VL CDR2 comprising the amino acid sequence of any one of the following SEQ ID NOs: 7, 17, 27, 37, 47, 57, 67, 77, 87, 97, 107, 117, 127, 137, 147, 157, 167, 177, 187, 197, 207, 217, 227, 237, 247, 257, 267, 277, 287, 297, 307, 317, 327, 337, 347, 357, 367, 377, 387, 397, 407, 417, 427, 437, 447, 457, 467, 477, 487, 497, 507, 517, 527, 537, 547, 557, 567, 577, 587, 597, 607, 617, 627, 637, 647, 657, 667, 677, 687, 697, 707, 717, 727, 737, 747, 757, 767, 777, 787, 797, 807, 817, 827, 837, 847, 857, 867, 877, 887, 897, 907, 917, 927, 937, 947, 957, 967, 977, 987, 997, 1007, 1017, 1027, 1037, 1047, 1057, 1067, 1077, 1087, 1097, 1107, 1117, 1127, 1137, 1147, 1157, 1167, 1177, 1187, 1197, 1207, 1217, 1227, 1237, 1247, 1257, 1267, 1277, 1287, 1297, 1307, 1317, 1327, 1337, 1347, 1357, 1367, 1377, 1387, 1397, 1407, 1417, 1427, 1437, 1447, 1457, 1467, 1477, 1487, 1497, 1507, 1517, 1527, 1537, 1547, 1557, 1567, 1577, 1587, 1597, 1607, 1617, 1627, 1637, 1647, 1657, 1667, 1677, 1687, 1697, 1707, 1717, 1727, 1737, 1747, 1757, 1767, 1777, 1787, 1797, 1807, 1817, 1827, 1837, 1847, 1857, 1867, 1877, 1887, 1897, 1907, 2162, 2167, 2172, 2177, 2182, 2187, 2192, 2197, 2202, 2207, 2212, 2217, 2222, 2227, 2232, 2237, 2242, 2247, 2252, 2257, 2262, 2267, 2272, 2277, 2282, 2287, 2292, 2297, 2302, 2307, 2312, 2317, 2322, 2327, 2332, or 2337; and a VL CDR3 comprising the amino acid sequence of any one of the following SEQ ID NOs: 8, 18, 28, 38, 48, 58, 68, 78, 88, 98, 108, 118, 128, 138, 148, 158, 168, 178, 188, 198, 208, 218, 228, 238, 248, 258, 268, 278, 288, 298, 308, 318, 328, 338, 348, 358, 368, 378, 388, 398, 408, 418, 428, 438, 448, 458, 468, 478, 488, 498, 508, 518, 528, 538, 548, 558, 568, 578, 588, 598, 608, 618, 628, 638, 648, 658, 668, 678, 688, 698, 708, 718, 728, 738, 748, 758, 768, 778, 788, 798, 808, 818, 828, 838, 848, 858, 868, 878, 888, 898, 908, 918, 928, 938, 948, 958, 968, 978, 988, 998, 1008, 1018, 1028, 1038, 1048, 1058, 1068, 1078, 1088, 1098, 1108, 1118, 1128, 1138, 1148, 1158, 1168, 1178, 1188, 1198, 1208, 1218, 1228, 1238, 1248, 1258, 1268, 1278, 1288, 1298, 1308, 1318, 1328, 1338, 1348, 1358, 1368, 1378, 1388, 1398, 1408, 1418, 1428, 1438, 1448, 1458, 1468, 1478, 1488, 1498, 1508, 1518, 1528, 1538, 1548, 1558, 1568, 1578, 1588, 1598, 1608, 1618, 1628, 1638, 1648, 1658, 1668, 1678, 1688, 1698, 1708, 1718, 1728, 1738, 1748, 1758, 1768, 1778, 1788, 1798, 1808, 1818, 1828, 1838, 1848, 1858, 1868, 1878, 1888, 1898, 1908, 2163, 2168, 2173, 2178, 2183, 2188, 2193, 2198, 2203, 2208, 2213, 2218, 2223, 2228, 2233, 2238, 2243, 2248, 2253, 2258, 2263, 2268, 2273, 2278, 2283, 2288, 2293, 2298, 2303, 2308, 2313, 2318, 2323, 2328, 2333, or 2338.

[0010] In one aspect, the antibody comprises: a heavy chain comprising the amino acid sequence of any one of the following SEQ ID NOs: 4, 14, 24, 34, 44, 54, 64, 74, 84, 94, 104, 114, 124, 134, 144, 154, 164, 174, 184, 194, 204, 214, 224, 234, 244, 254, 264, 274, 284, 294, 304, 314, 324, 334, 344, 354, 364, 374, 384, 394, 404, 414, 424, 434, 444, 454, 464, 474, 484, 494, 504, 514, 524, 534, 544, 554, 564, 574, 584, 594, 604, 614, 624, 634, 644, 654, 664, 674, 684, 694, 704, 714, 724, 734, 744, 754, 764, 774, 784, 794, 804, 814, 824, 834, 844, 854, 864, 874, 884, 894, 904, 914, 924, 934, 944, 954, 964, 974, 984, 994, 1004, 1014, 1024, 1034, 1044, 1054, 1064, 1074, 1084, 1094, 1104, 1114, 1124, 1134, 1144, 1154, 1164, 1174, 1184, 1194, 1204, 1214, 1224, 1234, 1244, 1254, 1264, 1274, 1284, 1294, 1304, 1314, 1324, 1334, 1344, 1354, 1364, 1374, 1384, 1394, 1404, 1414, 1424, 1434, 1444, 1454, 1464, 1474, 1484, 1494, 1504, 1514, 1524, 1534, 1544, 1554, 1564, 1574, 1584, 1594, 1604, 1614, 1624, 1634, 1644, 1654, 1664, 1674, 1684, 1694, 1704, 1714, 1724, 1734, 1744, 1754, 1764, 1774, 1784, 1794, 1804, 1814, 1824, 1834, 1844, 1854, 1864, 1874, 1884, 1894, 1904, 1914, 1919, 1924, 1929, 1934, 1939, 1944, 1949, 1954, 1959, 1964, 1969, 1974, 1979, 1984, 1989, 1994, 1999, 2004, 2009, 2014, 2019, 2024, 2029, 2034, 2039, 2044, 2049, 2054, 2059, 2064, 2069, 2074, 2079, 2084, 2089, 2094, 2099, 2104, 2109, 2114, 2119, 2124, 2129, 2134, 2139, 2144, 2149, 2154, 2159, 2164, 2169, 2174, 2179, 2184, or 2189, and a light chain comprising the amino acid sequence of any one of the following SEQ ID NOs: 9, 19, 29, 39, 49, 59, 69, 79, 89, 99, 109, 119, 129, 139, 149, 159, 169, 179, 189, 199, 209, 219, 229, 239, 249, 259, 269, 279, 289, 299, 309, 319, 329, 339, 349, 359, 369, 379, 389, 399, 409, 419, 429, 439, 449, 459, 469, 479, 489, 499, 509, 519, 529, 539, 549, 559, 569, 579, 589, 599, 609, 619, 629, 639, 649, 659, 669, 679, 689, 699, 709, 719, 729, 739, 749, 759, 769, 779, 789, 799, 809, 819, 829, 839, 849, 859, 869, 879, 889, 899, 909, 919, 929, 939, 949, 959, 969, 979, 989, 999, 1009, 1019, 1029, 1039, 1049, 1059, 1069, 1079, 1089, 1099, 1109, 1119, 1129, 1139, 1149, 1159, 1169, 1179, 1189, 1199, 1209, 1219, 1229, 1239, 1249, 1259, 1269, 1279, 1289, 1299, 1309, 1319, 1329, 1339, 1349, 1359, 1369, 1379, 1389, 1399, 1409, 1419, 1429, 1439, 1449, 1459, 1469, 1479, 1489, 1499, 1509, 1519, 1529, 1539, 1549, 1559, 1569, 1579, 1589, 1599, 1609, 1619, 1629, 1639, 1649, 1659, 1669, 1679, 1689, 1699, 1709, 1719, 1729, 1739, 1749, 1759, 1769, 1779, 1789, 1799, 1809, 1819, 1829, 1839, 1849, 1859, 1869, 1879, 1889, 1899, 1909, 2164, 2169, 2174, 2179, 2184, 2189, 2194, 2199, 2204, 2209, 2214, 2219, 2224, 2229, 2234, 2239, 2244, 2249, 2254, 2259, 2264, 2269, 2274, 2279, 2284, 2289, 2294, 2299, 2304, 2309, 2314, 2319, 2324, 2329, 2334, or 2339. In another aspect, the antibody is encoded by a nucleic acid that comprises: a VH comprising the nucleic acid sequence of any one of the following SEQ ID NOs: 5, 15, 25, 35, 45, 55, 65, 75, 85, 95, 105, 115, 125, 135, 145, 155, 165, 175, 185, 195, 205, 215, 225, 235, 245, 255, 265, 275, 285, 295, 305, 315, 325, 335, 345, 355, 365, 375, 385, 395, 405, 415, 425, 435, 445, 455, 465, 475, 485, 495, 505, 515, 525, 535, 545, 555, 565, 575, 585, 595, 605, 615, 625, 635, 645, 655, 665, 675, 685, 695, 705, 715, 725, 735, 745, 755, 765, 775, 785, 795, 805, 815, 825, 835, 845, 855, 865, 875, 885, 895, 905, 915, 925, 935, 945, 955, 965, 975, 985, 995, 1005, 1015, 1025, 1035, 1045, 1055, 1065, 1075, 1085, 1095, 1105, 1115, 1125, 1135, 1145, 1155, 1165, 1175, 1185, 1195, 1205, 1215, 1225, 1235, 1245, 1255, 1265, 1275, 1285, 1295, 1305, 1315, 1325, 1335, 1345, 1355, 1365, 1375, 1385, 1395, 1405, 1415, 1425, 1435, 1445, 1455, 1465, 1475, 1485, 1495, 1505, 1515, 1525, 1535, 1545, 1555, 1565, 1575, 1585, 1595, 1605, 1615, 1625, 1635, 1645, 1655, 1665, 1675, 1685, 1695, 1705, 1715, 1725, 1735, 1745, 1755, 1765, 1775, 1785, 1795, 1805, 1815, 1825, 1835, 1845, 1855, 1865, 1875, 1885, 1895, 1905, 1915, 1920, 1925, 1930, 1935, 1940, 1945, 1950, 1955, 1960, 1965, 1970, 1975, 1980, 1985, 1990, 1995, 2000, 2005, 2010, 2015, 2020, 2025, 2030, 2035, 2040, 2045, 2050, 2055, 2060, 2065, 2070, 2075, 2080, 2085, 2090, 2095, 2100, 2105, 2110, 2115, 2120, 2125, 2130, 2135, 2140, 2145, 2150, 2155, 2160, 2165, 2170, 2175, 2180, 2185, or 2190, and a VL comprising the nucleic acid sequence of any one of the following SEQ ID NOs: 10, 20, 30, 40, 50, 60, 70, 80, 90, 100, 110, 120, 130, 140, 150, 160, 170, 180, 190, 200, 210, 220, 230, 240, 250, 260, 270, 280, 290, 300, 310, 320, 330, 340, 350, 360, 370, 380, 390, 400, 410, 420, 430, 440, 450, 460, 470, 480, 490, 500, 510, 520, 530, 540, 550, 560, 570, 580, 590, 600, 610, 620, 630, 640, 650, 660, 670, 680, 690, 700, 710, 720, 730, 740, 750, 760, 770, 780, 790, 800, 810, 820, 830, 840, 850, 860, 870, 880, 890, 900, 910, 920, 930, 940, 950, 960, 970, 980, 990, 1000, 1010, 1020, 1030, 1040, 1050, 1060, 1070, 1080, 1090, 1100, 1110, 1120, 1130, 1140, 1150, 1160, 1170, 1180, 1190, 1200, 1210, 1220, 1230, 1240, 1250, 1260, 1270, 1280, 1290, 1300, 1310, 1320, 1330, 1340, 1350, 1360, 1370, 1380, 1390, 1400, 1410, 1420, 1430, 1440, 1450, 1460, 1470, 1480, 1490, 1500, 1510, 1520, 1530, 1540, 1550, 1560, 1570, 1580, 1590, 1600, 1610, 1620, 1630, 1640, 1650, 1660, 1670, 1680, 1690, 1700, 1710, 1720, 1730, 1740, 1750, 1760, 1770, 1780, 1790, 1800, 1810, 1820, 1830, 1840, 1850, 1860, 1870, 1880, 1890, 1900, 1910, 2165, 2170, 2175, 2180, 2185, 2190, 2195, 2200, 2205, 2210, 2215, 2220, 2225, 2230, 2235, 2240, 2245, 2250, 2255, 2260, 2265, 2270, 2275, 2280, 2285, 2290, 2295, 2300, 2305, 2310, 2315, 2320, 2325, 2330, 2335, or 2340. In another aspect, the antibody comprises: a heavy chain variable domain (VH) comprising complementarity determining regions CDR1 to CDR3, comprising the amino acid sequence triplets: 1, 2, 3; 11, 12, 13; 21, 22, 23; 31, 32, 33; 41, 42, 43; 51, 52, 53; 61, 62, 63; 71, 72, 73; 81, 82, 83; 91, 92, 93; 101, 102, 103; 111, 112, 113; 121, 122, 123; 131, 132, 133; 141, 142, 143; 151, 152, 153; 161, 162, 163; 171, 172, 173; 181, 182, 183; 191, 192, 193; 201, 202, 203; 211, 212, 213; 221, 222, 223; 231, 232, 233; 241, 242, 243; 251, 252, 253; 261, 262, 263; 271, 272, 273; 281, 282, 283; 291, 292, 293; 301, 302, 303; 311, 312, 313; 321, 322, 323; 331, 332, 333; 341, 342, 343; 351, 352, 353; 361, 362, 363; 371, 372, 373; 381, 382, 383; 391, 392, 393; 401, 402, 403; 411, 412, 413; 421, 422, 423; 431, 432, 433; 441, 442, 443; 451, 452, 453; 461, 462, 463; 471, 472, 473; 481, 482, 483; 491, 492, 493; 501, 502, 503; 511, 512, 513; 521, 522, 523; 531, 532, 533; 541, 542, 543; 551, 552, 553; 561, 562, 563; 571, 572, 573; 581, 582, 583; 591, 592, 593; 601, 602, 603; 611, 612, 613; 621, 622, 623; 631, 632, 633; 641, 642, 643; 651, 652, 653; 661, 662, 663; 671, 672, 673; 681, 682, 683; 691, 692, 693; 701, 702, 703; 711, 712, 713; 721, 722, 723; 731, 732, 733; 741, 742, 743; 751, 752, 753; 761, 762, 763; 771, 772, 773; 781, 782, 783; 791, 792, 793; 801, 802, 803; 811, 812, 813; 821, 822, 823; 831, 832, 833; 841, 842, 843; 851, 852, 853; 861, 862, 863; 871, 872, 873; 881, 882, 883; 891, 892, 893; 901, 902, 903; 911, 912, 913; 921, 922, 923; 931, 932, 933; 941, 942, 943; 951, 952, 953; 961, 962, 963; 971, 972, 973; 981, 982, 983; 991, 992, 993; 1001, 1002, 1003; 1011, 1012, 1013; 1021, 1022, 1023; 1031, 1032, 1033; 1041, 1042, 1043; 1051, 1052, 1053; 1061, 1062, 1063; 1071, 1072, 1073; 1081, 1082, 1083; 1091, 1092, 1093; 1101, 1102, 1103; 1111, 1112, 1113; 1121, 1122, 1123; 1131, 1132, 1133; 1141, 1142, 1143; 1151, 1152, 1153; 1161, 1162, 1163; 1171, 1172, 1173; 1181, 1182, 1183; 1191, 1192, 1193; 1201, 1202, 1203; 1211, 1212, 1213; 1221, 1222, 1223; 1231, 1232, 1233; 1241, 1242, 1243; 1251, 1252, 1253; 1261, 1262, 1263; 1271, 1272, 1273; 1281, 1282, 1283; 1291, 1292, 1293; 1301, 1302, 1303; 1311, 1312, 1313; 1321, 1322, 1323; 1331, 1332, 1333; 1341, 1342, 1343; 1351, 1352, 1353; 1361, 1362, 1363; 1371, 1372, 1373; 1381, 1382, 1383; 1391, 1392, 1393; 1401, 1402, 1403; 1411, 1412, 1413; 1421, 1422, 1423; 1431, 1432, 1433; 1441, 1442, 1443; 1451, 1452, 1453; 1461, 1462, 1463; 1471, 1472, 1473; 1481, 1482, 1483; 1491, 1492, 1493; 1501, 1502, 1503; 1511, 1512, 1513; 1521, 1522, 1523; 1531, 1532, 1533; 1541, 1542, 1543; 1551, 1552, 1553; 1561, 1562, 1563; 1571, 1572, 1573; 1581, 1582, 1583; 1591, 1592, 1593; 1601, 1602, 1603; 1611, 1612, 1613; 1621, 1622, 1623; 1631, 1632, 1633; 1641, 1642, 1643; 1651, 1652, 1653; 1661, 1662, 1663; 1671, 1672, 1673; 1681, 1682, 1683; 1691, 1692, 1693; 1701, 1702, 1703; 1711, 1712, 1713; 1721, 1722, 1723; 1731, 1732, 1733; 1741, 1742, 1743; 1751, 1752, 1753; 1761, 1762, 1763; 1771, 1772, 1773; 1781, 1782, 1783; 1791, 1792, 1793; 1801, 1802, 1803; 1811, 1812, 1813; 1821, 1822, 1823; 1831, 1832, 1833; 1841, 1842, 1843; 1851, 1852, 1853; 1861, 1862, 1863; 1871, 1872, 1873; 1881, 1882, 1883; 1891, 1892, 1893; 1901, 1902, 1903; 1911, 1912, 1913; 1921, 1922, 1923; or 1931, 1932, 1933; and a light chain variable domain (VL) comprising complementarity determining regions CDR1 to CDR3, comprising the amino acid sequence triplets: 6, 7, 8; 16, 17, 18; 26, 27, 28; 36, 37, 38; 46, 47, 48; 56, 57, 58; 66, 67, 68; 76, 77, 78; 86, 87, 88; 96, 97, 98; 106, 107, 108; 116, 117, 118; 126, 127, 128; 136, 137, 138; 146, 147, 148; 156, 157, 158; 166, 167, 168; 176, 177, 178; 186, 187, 188; 196, 197, 198; 206, 207, 208; 216, 217, 218; 226, 227, 228; 236, 237, 238; 246, 247, 248; 256, 257, 258; 266, 267, 268; 276, 277, 278; 286, 287, 288; 296, 297, 298; 306, 307, 308; 316, 317, 318; 326, 327, 328; 336, 337, 338; 346, 347, 348; 356, 357, 358; 366, 367, 368; 376, 377, 378; 386, 387, 388; 396, 397, 398; 406, 407, 408; 416, 417, 418; 426, 427, 428; 436, 437, 438; 446, 447, 448; 456, 457, 458; 466, 467, 468; 476, 477, 478; 486, 487, 488; 496, 497, 498; 506, 507, 508; 516, 517, 518; 526, 527, 528; 536, 537, 538; 546, 547, 548; 556, 557, 558; 566, 567, 568; 576, 577, 578; 586, 587, 588; 596, 597, 598; 606, 607, 608; 616, 617, 618; 626, 627, 628; 636, 637, 638; 646, 647, 648; 656, 657, 658; 666, 667, 668; 676, 677, 678; 686, 687, 688; 696, 697, 698; 706, 707, 708; 716, 717, 718; 726, 727, 728; 736, 737, 738; 746, 747, 748; 756, 757, 758; 766, 767, 768; 776, 777, 778; 786, 787, 788; 796, 797, 798; 806, 807, 808; 816, 817, 818; 826, 827, 828; 836, 837, 838; 846, 847, 848; 856, 857, 858; 866, 867, 868; 876, 877, 878; 886, 887, 888; 896, 897, 898; 906, 907, 908; 916, 917, 918; 926, 927, 928; 936, 937, 938; 946, 947, 948; 956, 957, 958; 966, 967, 968; 976, 977, 978; 986, 987, 988; 996, 997, 998; 1006, 1007, 1008; 1016, 1017, 1018; 1026, 1027, 1028; 1036, 1037, 1038; 1046, 1047, 1048; 1056, 1057, 1058; 1066, 1067, 1068; 1076, 1077, 1078; 1086, 1087, 1088; 1096, 1097, 1098; 1106, 1107, 1108; 1116, 1117, 1118; 1126, 1127, 1128; 1136, 1137, 1138; 1146, 1147, 1148; 1156, 1157, 1158; 1166, 1167, 1168; 1176, 1177, 1178; 1186, 1187, 1188; 1196, 1197, 1198; 1206, 1207, 1208; 1216, 1217, 1218; 1226, 1227, 1228; 1236, 1237, 1238; 1246, 1247, 1248; 1256, 1257, 1258; 1266, 1267, 1268; 1276, 1277, 1278; 1286, 1287, 1288; 1296, 1297, 1298; 1306, 1307, 1308; 1316, 1317, 1318; 1326, 1327, 1328; 1336, 1337, 1338; 1346, 1347, 1348; 1356, 1357, 1358; 1366, 1367, 1368; 1376, 1377, 1378; 1386, 1387, 1388; 1396, 1397, 1398; 1406, 1407, 1408; 1416, 1417, 1418; 1426, 1427, 1428; 1436, 1437, 1438; 1446, 1447, 1448; 1456, 1457, 1458; 1466, 1467, 1468; 1476, 1477, 1478; 1486, 1487, 1488; 1496, 1497, 1498; 1506, 1507, 1508; 1516, 1517, 1518; 1526, 1527, 1528; 1536, 1537, 1538; 1546, 1547, 1548; 1556, 1557, 1558; 1566, 1567, 1568; 1576, 1577, 1578; 1586, 1587, 1588; 1596, 1597, 1598; 1606, 1607, 1608; 1616, 1617, 1618; 1626, 1627, 1628; 1636, 1637, 1638; 1646, 1647, 1648; 1656, 1657, 1658; 1666, 1667, 1668; 1676, 1677, 1678; 1686, 1687, 1688; 1696, 1697, 1698; 1706, 1707, 1708; 1716, 1717, 1718; 1726, 1727, 1728; 1736, 1737, 1738; 1746, 1747, 1748; 1756, 1757, 1758; 1766, 1767, 1768; 1776, 1777, 1778; 1786, 1787, 1788; 1796, 1797, 1798; 1806, 1807, 1808; 1816, 1817, 1818; 1826, 1827, 1828; 1836, 1837, 1838; 1846, 1847, 1848; 1856, 1857, 1858; 1866, 1867, 1868; 1876, 1877, 1878; 1886, 1887, 1888; 1896, 1897, 1898; 1906, 1907, 1908; 1916, 1917, 1918; 1926, 1927, 1928; or 1936, 1937, 1938. In another aspect, the antibody comprises: a heavy chain variable domain (VH) comprising complementarity determining regions CDR1 to CDR3, comprising the amino acid sequence triplets: 1941, 1942, 1943; 1946, 1947, 1948; 1951, 1952, 1953; 1956, 1957, 1958; 1961, 1962, 1963; 1966, 1967, 1968; 1971, 1972, 1973; 1976, 1977, 1978; 1981, 1982, 1983; 1986, 1987, 1988; 1991, 1992, 1993; 1996, 1997, 1998; 2001, 2002, 2003; 2006, 2007, 2008; 2011, 2012, 2013; 2016, 2017, 2018; 2021, 2022, 2023; 2026, 2027, 2028; 2031, 2032, 2033; 2036, 2037, 2038; 2041, 2042, 2043; 2046, 2047, 2048; 2051, 2052, 2053; 2056, 2057, 2058; 2061, 2062, 2063; 2066, 2067, 2068; 2071, 2072, 2073; 2076, 2077, 2078; 2081, 2082, 2083; 2086, 2087, 2088; 2091, 2092, 2093; 2096, 2097, 2098; 2101, 2102, 2103; 2106, 2107, 2108; 2111, 2112, 2113; 2116, 2117, 2118; 2121, 2122, 2123; 2126, 2127, 2128; 2131, 2132, 2133; 2136, 2137, 2138; 2141, 2142, 2143; 2146, 2147, 2148; 2151, 2152, 2153; 2156, 2157, 2158; 2161, 2162, 2163; 2166, 2167, 2168; 2171, 2172, 2173; 2176, 2177, 2178; 2181, 2182, 2183; or 2186, 2187, 2188; and a light chain variable domain (VL) comprising complementarity determining regions CDR1 to CDR3, comprising the amino acid sequence triplets: 2191, 2192, 2193; 2196, 2197, 2198; 2201, 2202, 2203; 2206, 2207, 2208; 2211, 2212, 2213; 2216, 2217, 2218; 2221, 2222, 2223; 2226, 2227, 2228; 2231, 2232, 2233; 2236, 2237, 2238; 2241, 2242, 2243; 2246, 2247, 2248; 2251, 2252, 2253; 2256, 2257, 2258; 2261, 2262, 2263; 2266, 2267, 2268; 2271, 2272, 2273; 2276, 2277, 2278; 2281, 2282, 2283; 2286, 2287, 2288; 2291, 2292, 2293; 2296, 2297, 2298; 2301, 2302, 2303; 2306, 2307, 2308; 2311, 2312, 2313; 2316, 2317, 2318; 2321, 2322, 2323; 2326, 2327, 2328; 2331, 2332, 2333; or 2336, 2337, 2338. In another aspect, the antibody is a monoclonal, bispecific, multivalent, multi-specific, diabody, chimeric, scFv antibody, or fragments thereof. In another aspect, the antibody is a full-length antibody. In another aspect, the antibody is an antibody fragment. In another aspect, the antibody is fused to an Fc domain of any one of the following: human IgG1, human IgG2, human IgG3, and human IgG4. In another aspect, the Fc domain is a wild-type, variant, or truncated Fc domain. In another aspect, the antibody further comprises a peptide linker between a VH2 domain and the CH1 domain.

[0011] As embodied and broadly described herein, an aspect of the present disclosure relates to a method of treating a disease in a subject in need thereof, comprising administering to the subject a therapeutically effective amount of the antibodies, binding fragments, bi- or multi-valent antibodies, chimeric proteins, scFv, etc. described hereinabove. In one aspect, the disease is an autoimmune disease, an inflammatory disease, or a cancer. In another aspect, the subject is human.

[0012] As embodied and broadly described herein, an aspect of the present disclosure relates to a nucleic acid encoding an anti-CD3 antibody, wherein the nucleic acid comprises: a VH comprising the nucleic acid sequence of any one of the following SEQ ID NOs: 5, 15, 25, 35, 45, 55, 65, 75, 85, 95, 105, 115, 125, 135, 145, 155, 165, 175, 185, 195, 205, 215, 225, 235, 245, 255, 265, 275, 285, 295, 305, 315, 325, 335, 345, 355, 365, 375, 385, 395, 405, 415, 425, 435, 445, 455, 465, 475, 485, 495, 505, 515, 525, 535, 545, 555, 565, 575, 585, 595, 605, 615, 625, 635, 645, 655, 665, 675, 685, 695, 705, 715, 725, 735, 745, 755, 765, 775, 785, 795, 805, 815, 825, 835, 845, 855, 865, 875, 885, 895, 905, 915, 925, 935, 945, 955, 965, 975, 985, 995, 1005, 1015, 1025, 1035, 1045, 1055, 1065, 1075, 1085, 1095, 1105, 1115, 1125, 1135, 1145, 1155, 1165, 1175, 1185, 1195, 1205, 1215, 1225, 1235, 1245, 1255, 1265, 1275, 1285, 1295, 1305, 1315, 1325, 1335, 1345, 1355, 1365, 1375, 1385, 1395, 1405, 1415, 1425, 1435, 1445, 1455, 1465, 1475, 1485, 1495, 1505, 1515, 1525, 1535, 1545, 1555, 1565, 1575, 1585, 1595, 1605, 1615, 1625, 1635, 1645, 1655, 1665, 1675, 1685, 1695, 1705, 1715, 1725, 1735, 1745, 1755, 1765, 1775, 1785, 1795, 1805, 1815, 1825, 1835, 1845, 1855, 1865, 1875, 1885, 1895, 1905, 1915, 1920, 1925, 1930, 1935, 1940, 1945, 1950, 1955, 1960, 1965, 1970, 1975, 1980, 1985, 1990, 1995, 2000, 2005, 2010, 2015, 2020, 2025, 2030, 2035, 2040, 2045, 2050, 2055, 2060, 2065, 2070, 2075, 2080, 2085, 2090, 2095, 2100, 2105, 2110, 2115, 2120, 2125, 2130, 2135, 2140, 2145, 2150, 2155, 2160, 2165, 2170, 2175, 2180, 2185, or 2190, and a VL comprising the nucleic acid sequence of any one of the following SEQ ID NOs: 10, 20, 30, 40, 50, 60, 70, 80, 90, 100, 110, 120, 130, 140, 150, 160, 170, 180, 190, 200, 210, 220, 230, 240, 250, 260, 270, 280, 290, 300, 310, 320, 330, 340, 350, 360, 370, 380, 390, 400, 410, 420, 430, 440, 450, 460, 470, 480, 490, 500, 510, 520, 530, 540, 550, 560, 570, 580, 590, 600, 610, 620, 630, 640, 650, 660, 670, 680, 690, 700, 710, 720, 730, 740, 750, 760, 770, 780, 790, 800, 810, 820, 830, 840, 850, 860, 870, 880, 890, 900, 910, 920, 930, 940, 950, 960, 970, 980, 990, 1000, 1010, 1020, 1030, 1040, 1050, 1060, 1070, 1080, 1090, 1100, 1110, 1120, 1130, 1140, 1150, 1160, 1170, 1180, 1190, 1200, 1210, 1220, 1230, 1240, 1250, 1260, 1270, 1280, 1290, 1300, 1310, 1320, 1330, 1340, 1350, 1360, 1370, 1380, 1390, 1400, 1410, 1420, 1430, 1440, 1450, 1460, 1470, 1480, 1490, 1500, 1510, 1520, 1530, 1540, 1550, 1560, 1570, 1580, 1590, 1600, 1610, 1620, 1630, 1640, 1650, 1660, 1670, 1680, 1690, 1700, 1710, 1720, 1730, 1740, 1750, 1760, 1770, 1780, 1790, 1800, 1810, 1820, 1830, 1840, 1850, 1860, 1870, 1880, 1890, 1900, 1910, 2165, 2170, 2175, 2180, 2185, 2190, 2195, 2200, 2205, 2210, 2215, 2220, 2225, 2230, 2235, 2240, 2245, 2250, 2255, 2260, 2265, 2270, 2275, 2280, 2285, 2290, 2295, 2300, 2305, 2310, 2315, 2320, 2325, 2330, 2335, or 2340.

[0013] As embodied and broadly described herein, an aspect of the present disclosure relates to an expression vector comprising a nucleic acid encoding at least one of a nucleic acids encoding the antibodies, binding fragments, bi- or multi-valent antibodies, chimeric proteins, scFv, etc. described hereinabove. Also included are one or more host cells comprising the vector(s) described hereinabove.

[0014] As embodied and broadly described herein, an aspect of the present disclosure relates to a method of making an anti-CD3 antibody comprising: expressing in a cell a heavy chain variable domain (VH) comprising complementarity determining regions CDR1 to CDR3, comprising the amino acid sequence triplets: 1, 2, 3; 11, 12, 13; 21, 22, 23; 31, 32, 33; 41, 42, 43; 51, 52, 53; 61, 62, 63; 71, 72, 73; 81, 82, 83; 91, 92, 93; 101, 102, 103; 111, 112, 113; 121, 122, 123; 131, 132, 133; 141, 142, 143; 151, 152, 153; 161, 162, 163; 171, 172, 173; 181, 182, 183; 191, 192, 193; 201, 202, 203; 211, 212, 213; 221, 222, 223; 231, 232, 233; 241, 242, 243; 251, 252, 253; 261, 262, 263; 271, 272, 273; 281, 282, 283; 291, 292, 293; 301, 302, 303; 311, 312, 313; 321, 322, 323; 331, 332, 333; 341, 342, 343; 351, 352, 353; 361, 362, 363; 371, 372, 373; 381, 382, 383; 391, 392, 393; 401, 402, 403; 411, 412, 413; 421, 422, 423; 431, 432, 433; 441, 442, 443; 451, 452, 453; 461, 462, 463; 471, 472, 473; 481, 482, 483; 491, 492, 493; 501, 502, 503; 511, 512, 513; 521, 522, 523; 531, 532, 533; 541, 542, 543; 551, 552, 553; 561, 562, 563; 571, 572, 573; 581, 582, 583; 591, 592, 593; 601, 602, 603; 611, 612, 613; 621, 622, 623; 631, 632, 633; 641, 642, 643; 651, 652, 653; 661, 662, 663; 671, 672, 673; 681, 682, 683; 691, 692, 693; 701, 702, 703; 711, 712, 713; 721, 722, 723; 731, 732, 733; 741, 742, 743; 751, 752, 753; 761, 762, 763; 771, 772, 773; 781, 782, 783; 791, 792, 793; 801, 802, 803; 811, 812, 813; 821, 822, 823; 831, 832, 833; 841, 842, 843; 851, 852, 853; 861, 862, 863; 871, 872, 873; 881, 882, 883; 891, 892, 893; 901, 902, 903; 911, 912, 913; 921, 922, 923; 931, 932, 933; 941, 942, 943; 951, 952, 953; 961, 962, 963; 971, 972, 973; 981, 982, 983; 991, 992, 993; 1001, 1002, 1003; 1011, 1012, 1013; 1021, 1022, 1023; 1031, 1032, 1033; 1041, 1042, 1043; 1051, 1052, 1053; 1061, 1062, 1063; 1071, 1072, 1073; 1081, 1082, 1083; 1091, 1092, 1093; 1101, 1102, 1103; 1111, 1112, 1113; 1121, 1122, 1123; 1131, 1132, 1133; 1141, 1142, 1143; 1151, 1152, 1153; 1161, 1162, 1163; 1171, 1172, 1173; 1181, 1182, 1183; 1191, 1192, 1193; 1201, 1202, 1203; 1211, 1212, 1213; 1221, 1222, 1223; 1231, 1232, 1233; 1241, 1242, 1243; 1251, 1252, 1253; 1261, 1262, 1263; 1271, 1272, 1273; 1281, 1282, 1283; 1291, 1292, 1293; 1301, 1302, 1303; 1311, 1312, 1313; 1321, 1322, 1323; 1331, 1332, 1333; 1341, 1342, 1343; 1351, 1352, 1353; 1361, 1362, 1363; 1371, 1372, 1373; 1381, 1382, 1383; 1391, 1392, 1393; 1401, 1402, 1403; 1411, 1412, 1413; 1421, 1422, 1423; 1431, 1432, 1433; 1441, 1442, 1443; 1451, 1452, 1453; 1461, 1462, 1463; 1471, 1472, 1473; 1481, 1482, 1483; 1491, 1492, 1493; 1501, 1502, 1503; 1511, 1512, 1513; 1521, 1522, 1523; 1531, 1532, 1533; 1541, 1542, 1543; 1551, 1552, 1553; 1561, 1562, 1563; 1571, 1572, 1573; 1581, 1582, 1583; 1591, 1592, 1593; 1601, 1602, 1603; 1611, 1612, 1613; 1621, 1622, 1623; 1631, 1632, 1633; 1641, 1642, 1643; 1651, 1652, 1653; 1661, 1662, 1663; 1671, 1672, 1673; 1681, 1682, 1683; 1691, 1692, 1693; 1701, 1702, 1703; 1711, 1712, 1713; 1721, 1722, 1723; 1731, 1732, 1733; 1741, 1742, 1743; 1751, 1752, 1753; 1761, 1762, 1763; 1771, 1772, 1773; 1781, 1782, 1783; 1791, 1792, 1793; 1801, 1802, 1803; 1811, 1812, 1813; 1821, 1822, 1823; 1831, 1832, 1833; 1841, 1842, 1843; 1851, 1852, 1853; 1861, 1862, 1863; 1871, 1872, 1873; 1881, 1882, 1883; 1891, 1892, 1893; 1901, 1902, 1903; 1911, 1912, 1913; 1921, 1922, 1923; or 1931, 1932, 1933; and a light chain variable domain (VL) comprising complementarity determining regions CDR1 to CDR3, comprising the amino acid sequence triplets: 6, 7, 8; 16, 17, 18; 26, 27, 28; 36, 37, 38; 46, 47, 48; 56, 57, 58; 66, 67, 68; 76, 77, 78; 86, 87, 88; 96, 97, 98; 106, 107, 108; 116, 117, 118; 126, 127, 128; 136, 137, 138; 146, 147, 148; 156, 157, 158; 166, 167, 168; 176, 177, 178; 186, 187, 188; 196, 197, 198; 206, 207, 208; 216, 217, 218; 226, 227, 228; 236, 237, 238; 246, 247, 248; 256, 257, 258; 266, 267, 268; 276, 277, 278; 286, 287, 288; 296, 297, 298; 306, 307, 308; 316, 317, 318; 326, 327, 328; 336, 337, 338; 346, 347, 348; 356, 357, 358; 366, 367, 368; 376, 377, 378; 386, 387, 388; 396, 397, 398; 406, 407, 408; 416, 417, 418; 426, 427, 428; 436, 437, 438; 446, 447, 448; 456, 457, 458; 466, 467, 468; 476, 477, 478; 486, 487, 488; 496, 497, 498; 506, 507, 508; 516, 517, 518; 526, 527, 528; 536, 537, 538; 546, 547, 548; 556, 557, 558; 566, 567, 568; 576, 577, 578; 586, 587, 588; 596, 597, 598; 606, 607, 608; 616, 617, 618; 626, 627, 628; 636, 637, 638; 646, 647, 648; 656, 657, 658; 666, 667, 668; 676, 677, 678; 686, 687, 688; 696, 697, 698; 706, 707, 708; 716, 717, 718; 726, 727, 728; 736, 737, 738; 746, 747, 748; 756, 757, 758; 766, 767, 768; 776, 777, 778; 786, 787, 788; 796, 797, 798; 806, 807, 808; 816, 817, 818; 826, 827, 828; 836, 837, 838; 846, 847, 848; 856, 857, 858; 866, 867, 868; 876, 877, 878; 886, 887, 888; 896, 897, 898; 906, 907, 908; 916, 917, 918; 926, 927, 928; 936, 937, 938; 946, 947, 948; 956, 957, 958; 966, 967, 968; 976, 977, 978; 986, 987, 988; 996, 997, 998; 1006, 1007, 1008; 1016, 1017, 1018; 1026, 1027, 1028; 1036, 1037, 1038; 1046, 1047, 1048; 1056, 1057, 1058; 1066, 1067, 1068; 1076, 1077, 1078; 1086, 1087, 1088; 1096, 1097, 1098; 1106, 1107, 1108; 1116, 1117, 1118; 1126, 1127, 1128; 1136, 1137, 1138; 1146, 1147, 1148; 1156, 1157, 1158; 1166, 1167, 1168; 1176, 1177, 1178; 1186, 1187, 1188; 1196, 1197, 1198; 1206, 1207, 1208; 1216, 1217, 1218; 1226, 1227, 1228; 1236, 1237, 1238; 1246, 1247, 1248; 1256, 1257, 1258; 1266, 1267, 1268; 1276, 1277, 1278; 1286, 1287, 1288; 1296, 1297, 1298; 1306, 1307, 1308; 1316, 1317, 1318; 1326, 1327, 1328; 1336, 1337, 1338; 1346, 1347, 1348; 1356, 1357, 1358; 1366, 1367, 1368; 1376, 1377, 1378; 1386, 1387, 1388; 1396, 1397, 1398; 1406, 1407, 1408; 1416, 1417, 1418; 1426, 1427, 1428; 1436, 1437, 1438; 1446, 1447, 1448; 1456, 1457, 1458; 1466, 1467, 1468; 1476, 1477, 1478; 1486, 1487, 1488; 1496, 1497, 1498; 1506, 1507, 1508; 1516, 1517, 1518; 1526, 1527, 1528; 1536, 1537, 1538; 1546, 1547, 1548; 1556, 1557, 1558; 1566, 1567, 1568; 1576, 1577, 1578; 1586, 1587, 1588; 1596, 1597, 1598; 1606, 1607, 1608; 1616, 1617, 1618; 1626, 1627, 1628; 1636, 1637, 1638; 1646, 1647, 1648; 1656, 1657, 1658; 1666, 1667, 1668; 1676, 1677, 1678; 1686, 1687, 1688; 1696, 1697, 1698; 1706, 1707, 1708; 1716, 1717, 1718; 1726, 1727, 1728; 1736, 1737, 1738; 1746, 1747, 1748; 1756, 1757, 1758; 1766, 1767, 1768; 1776, 1777, 1778; 1786, 1787, 1788; 1796, 1797, 1798; 1806, 1807, 1808; 1816, 1817, 1818; 1826, 1827, 1828; 1836, 1837, 1838; 1846, 1847, 1848; 1856, 1857, 1858; 1866, 1867, 1868; 1876, 1877, 1878; 1886, 1887, 1888; 1896, 1897, 1898; 1906, 1907, 1908; 1916, 1917, 1918; 1926, 1927, 1928; or 1936, 1937, 1938; or a heavy chain variable domain (VH) comprising complementarity determining regions CDR1 to CDR3, comprising the amino acid sequence triplets: 1941, 1942, 1943; 1946, 1947, 1948; 1951, 1952, 1953; 1956, 1957, 1958; 1961, 1962, 1963; 1966, 1967, 1968; 1971, 1972, 1973; 1976, 1977, 1978; 1981, 1982, 1983; 1986, 1987, 1988; 1991, 1992, 1993; 1996, 1997, 1998; 2001, 2002, 2003; 2006, 2007, 2008; 2011, 2012, 2013; 2016, 2017, 2018; 2021, 2022, 2023; 2026, 2027, 2028; 2031, 2032, 2033; 2036, 2037, 2038; 2041, 2042, 2043; 2046, 2047, 2048; 2051, 2052, 2053; 2056, 2057, 2058; 2061, 2062, 2063; 2066, 2067, 2068; 2071, 2072, 2073; 2076, 2077, 2078; 2081, 2082, 2083; 2086, 2087, 2088; 2091, 2092, 2093; 2096, 2097, 2098; 2101, 2102, 2103; 2106, 2107, 2108; 2111, 2112, 2113; 2116, 2117, 2118; 2121, 2122, 2123; 2126, 2127, 2128; 2131, 2132, 2133; 2136, 2137, 2138; 2141, 2142, 2143; 2146, 2147, 2148; 2151, 2152, 2153; 2156, 2157, 2158; 2161, 2162, 2163; 2166, 2167, 2168; 2171, 2172, 2173; 2176, 2177, 2178; 2181, 2182, 2183; or 2186, 2187, 2188; and a light chain variable domain (VL) comprising complementarity determining regions CDR1 to CDR3, comprising the amino acid sequence triplets: 2191, 2192, 2193; 2196, 2197, 2198; 2201, 2202, 2203; 2206, 2207, 2208; 2211, 2212, 2213; 2216, 2217, 2218; 2221, 2222, 2223; 2226, 2227, 2228; 2231, 2232, 2233; 2236, 2237, 2238; 2241, 2242, 2243; 2246, 2247, 2248; 2251, 2252, 2253; 2256, 2257, 2258; 2261, 2262, 2263; 2266, 2267, 2268; 2271, 2272, 2273; 2276, 2277, 2278; 2281, 2282, 2283; 2286, 2287, 2288; 2291, 2292, 2293; 2296, 2297, 2298; 2301, 2302, 2303; 2306, 2307, 2308; 2311, 2312, 2313; 2316, 2317, 2318; 2321, 2322, 2323; 2326, 2327, 2328; 2331, 2332, 2333; or 2336, 2337, 2338. In one aspect, the antibody is a monoclonal, bispecific, multivalent, multi-specific, diabody, chimeric, scFv antibody, or fragments thereof. In another aspect, the antibody is a full-length antibody. In another aspect, the antibody is an antibody fragment. In another aspect, the e antibody is fused to an Fc domain of any one of the following: human IgG1, human IgG2, human IgG3, and human IgG4. In another aspect, the Fc domain is a wild-type, variant, or truncated Fc domain. In another aspect, the antibodies, binding fragments, bi- or multi-valent antibodies, chimeric proteins, scFv, etc. described hereinabove further comprise a peptide linker between a VH2 domain and the CH1 domain. For each of the above amino acid and nucleic acid sequences, the present invention includes those that have at least 91, 92, 93, 94, 95, 96, 97, 98, 99 percent identify at the amino acid or nucleic acid level, and nucleic acid sequences optimized for expression in different host cells.

### BRIEF DESCRIPTION OF THE DRAWINGS

[0015] The patent or application file contains at least one drawing executed in color. Copies of this patent or patent application publication with color drawing(s) will be provided by the Office upon request and payment of the necessary fee. The present application can be understood by reference to the following description taking in conjunction with the accompanying figures.

[0016] FIGS. 1A and 1B illustrates the two paths to anti-CD3 specific antibody discovery (FIG. 1A) and the method of screening (FIG. 1B).

[0017] FIG. 2 shows the engineered epitopes steered immunization to three CD3E & CD3D epitopes.

[0018] FIG. 3 shows the immunized cohorts CD3 hybridoma primary screens.

[0019] FIG. 4 is a graph that shows epitope-steered immunization and StableHu generated CD3 hits across a broad binding range.

[0020] FIG. 5 shows that the StableHu generated a panel of CD3 Hits with a range of binding affinities.

[0021] FIG. 6 shows that the immunized CD3 repertoire was cloned into mammalian display for demultiplexed screening.

[0022] FIG. 7 shows the results from the first round of mammalian display screening of multi-epitope immunized CD3 repertoire.

[0023] FIG. 8 shows the results from the second round of immunized CD3 mammalian display repertoire that is significantly enriched to binders.

[0024] FIG. 9 shows that the ELISA screening identifies Hu-Cyno cross-reactive T-Cell binders.

[0025] FIG. 10 shows that StableHu generates a library of Hu-Cyno cross-reactivity from anti-CD3 murine CDR template. Significant overlap in Hu-Cyno library binding distributions, ˜50-fold binding range for 86 fully human CDR hits in-testing.

[0026] FIG. 11 shows cell sorting identifies range of Hu-Cyno Cross Reactive CD3 binders, with sequences rank-ordered from bin-weight analysis.

### DETAILED DESCRIPTION OF THE INVENTION

[0027] While the making and using of various embodiments of the present invention are discussed in detail below, it should be appreciated that the present invention provides many applicable inventive concepts that can be embodied in a wide variety of specific contexts. The specific embodiments discussed herein are merely illustrative of specific ways to make and use the invention and do not delimit the scope of the invention.

[0028] To facilitate the understanding of this invention, a number of terms are defined below. Terms defined herein have meanings as commonly understood by a person of ordinary skill in the areas relevant to the present invention. Terms such as “a”, “an” and “the” are not intended to refer to only a singular entity, but include the general class of which a specific example may be used for illustration. The terminology herein is used to describe specific embodiments of the invention, but their usage does not delimit the invention, except as outlined in the claims.

[0029] It should be understood that, unless clearly indicated, in any method described or disclosed herein that includes more than one act, the order of the acts is not necessarily limited to the order in which the acts of the method are recited, but the disclosure encompasses exemplary embodiments in which the order of the acts is so limited.

[0030] As used herein, the term “antibody” refers to an intact antibody or a binding fragment thereof that binds specifically to a target antigen. Binding fragments are produced by recombinant DNA techniques, or by enzymatic or chemical cleavage of intact antibodies. Binding fragments include Fab, Fab′, F(ab′)2, Fv, and single-chain variable fragment (scFv) antibodies. An antibody substantially inhibits adhesion of a receptor to a counterreceptor when an excess of antibody reduces the quantity of receptor bound to counterreceptor by at least about 20%, 40%, 60% or 80%, and more usually greater than about 85% (as measured in an in vitro competitive binding assay). The term “antibody” is used in the broadest sense, and specifically covers monoclonal antibodies (including full-length antibodies or other bivalent, Fc-region containing antibodies such as bivalent scFv Fc-fusion antibodies), polyclonal antibodies, multispecific antibodies (e.g., bispecific antibodies), and antibody fragments (e.g., Fab, Fab′, F(ab′)2, Fv, scFv) so long as they exhibit the desired biological activity. Antibodies (Abs) and immunoglobulins (Igs) are glycoproteins having the same structural characteristics. The present invention includes monoclonal antibodies (and binding fragments thereof) that are completely recombinant, in other words, where the complementarity determining regions (CDRs) are genetically spliced into a human antibody backbone, often referred to as veneering an antibody. Thus, in certain aspects, the monoclonal antibody is a fully synthesized antibody. In certain embodiments, the monoclonal antibodies (and binding fragments thereof) can be made in bacterial or eukaryotic cells, including plant cells.

[0031] As used herein, the term “antibody fragment” refers to a portion of a full-length antibody, generally the antigen-binding or variable region, and include Fab, Fab′, F(ab′)2, Fv, and scFv fragments. Papain digestion of antibodies produces two identical antigen-binding fragments, called the Fab fragment, each with a single antigen-binding site, and a residual “Fc” fragment, so-called for its ability to crystallize readily. Pepsin treatment yields an F(ab′)2 fragment that has two antigen-binding fragments which are capable of cross-linking antigen, and a residual other fragment (which is termed pFc′). As used herein, “functional fragment” with respect to antibodies, refers to Fv, F(ab) and F(ab′)2 fragments. As used herein, the “Fv” fragment is the minimum antibody fragment that contains a complete antigen recognition and binding site. This region consists of a dimer of one heavy and one light chain variable domain in a tight, non-covalent association (VH-VL dimer). It is in this configuration that the three CDRs of each variable domain interact to define an antigen-binding site on the surface of the VH-VL dimer. Collectively, the six CDRs confer antigen-binding specificity to the antibody. However, even a single variable domain (or half of an Fv comprising only three CDRs specific for an antigen) has the ability to recognize and bind antigen, although at a lower affinity than the entire binding site.

[0032] In some embodiments, bispecific or multispecific antibodies are provided, which comprise at least a heavy chain variable region from the antibody family of the invention and may comprise a heavy and light chain variable region provided herein. Bispecific antibodies comprise at least the heavy chain variable region of an antibody specific for a protein other than CD3, and may comprise a heavy and light chain variable region. In some such embodiments, the second antibody specificity binds to a tumor associated antigen, a targeting antigen, e.g., integrins, etc., a pathogen antigen, a checkpoint protein, and the like. Various formats of bispecific antibodies are within the scope of the invention, including without limitation single chain polypeptides, two chain polypeptides, three chain polypeptides, four chain polypeptides, and multiples thereof.

[0033] The Fab fragment, also designated as F(ab), also contains the constant domain of the light chain and the first constant domain (CH1) of the heavy chain. Fab′ fragments differ from Fab fragments by the addition of a few residues at the carboxyl terminus of the heavy chain CH1 domain including one or more cysteines from the antibody hinge region. Fab′-SH is the designation herein for Fab′ in which the cysteine residue(s) of the constant domains have a free thiol group. F(ab′) fragments are produced by cleavage of the disulfide bond at the hinge cysteines of the F(ab′)2 pepsin digestion product. Additional chemical couplings of antibody fragments are known to those of ordinary skill in the art.

[0034] Native antibodies and immunoglobulins are usually heterotetrameric glycoproteins of about 150,000 daltons, composed of two identical light (L) chains and two identical heavy (H) chains. Each light chain is linked to a heavy chain by at least one covalent disulfide bond, however, the number of disulfide linkages varies between the heavy chains of different immunoglobulin isotypes. Each heavy and light chain also has regularly spaced intrachain disulfide bridges. Each heavy chain has at one end a variable domain (VH) followed by the constant domains. Each light chain has a variable domain at one end (VL) and a constant domain at its other end. The constant domain of the light chain is aligned with the first constant domain of the heavy chain, and the light chain variable domain is aligned with the variable domain of the heavy chain. Particular amino acid residues form an interface between the light and heavy chain variable domains (Clothia et al., J. Mol. Biol. 186, 651-66, 1985); Novotny and Haber, Proc. Natl. Acad. Sci. USA 82 4592-4596 (1985), relevant portions incorporated herein by reference.

[0035] As used herein, an “isolated” antibody is one that has been identified and separated and/or recovered from a component of the environment in which it was produced. Contaminant components of its production environment are materials, which would interfere with diagnostic or therapeutic uses for the antibody, and may include enzymes, hormones, and other proteinaceous or nonproteinaceous solutes. In certain embodiments, the antibody will be purified as measurable by at least three different methods: 1) to greater than 50% by weight of antibody as determined by the Lowry method, such as more than 75% by weight, or more than 85% by weight, or more than 95% by weight, or more than 99% by weight; 2) to a degree sufficient to obtain at least 10 residues of N-terminal or internal amino acid sequence by use of a spinning cup sequentator, such as at least 15 residues of sequence; or 3) to homogeneity by SDS-PAGE under reducing or non-reducing conditions using Coomasie blue or, preferably, silver stain. Isolated antibody includes the antibody in situ within recombinant cells since at least one component of the antibody's natural environment will not be present. Ordinarily, however, isolated antibody will be prepared by at least one purification step.

[0036] As used herein, the terms “antibody mutant” or “antibody variant” refer to an amino acid sequence variant of an antibody wherein one or more of the amino acid residues have been modified. Such mutants necessarily have less than 100% sequence identity or similarity with the amino acid sequence having at least 75% amino acid sequence identity or similarity with the amino acid sequence of either the heavy or light chain variable domain of the antibody, such as at least 80%, or at least 85%, or at least 90%, or at least 95, 96, 97, 98, or 99%.

[0037] As used herein, the term “variable” in the context of the variable domain of antibodies, refers to the fact that certain portions of the variable domains differ extensively in sequence among antibodies and are used in the binding and specificity of each particular antibody for its particular antigen. However, the variability is not evenly distributed through the variable domains of antibodies. It is concentrated in three segments called complementarity determining regions (CDRs) also known as hypervariable regions both in the light chain and the heavy chain variable domains. There are at least two techniques for determining CDRs: (1) an approach based on cross-species sequence variability (i.e., Kabat et al., Sequences of Proteins of Immunological Interest (National Institute of Health, Bethesda, Md. 1987); and (2) an approach based on crystallographic studies of antigen-antibody complexes (Chothia, C. et al. (1989), Nature 342:877), or both, that is Chothia plus Kabat. The more highly conserved portions of variable domains are called the framework (FR). The variable domains of native heavy and light chains each comprise four FR regions, largely adopting a ß-sheet configuration, connected by three CDRs, which form loops connecting, and in some cases forming part of, the β-sheet structure. The CDRs in each chain are held together in close proximity by the FR regions and, with the CDRs from the other chain, contribute to the formation of the antigen-binding site of antibodies (see Kabat et al.) The constant domains are not involved directly in binding an antibody to its cognate antigen but exhibit various effector function, such as participation of the antibody in antibody-dependent cellular toxicity.

[0038] The light chains of antibodies (immunoglobulin) from any vertebrate species can be assigned to one of two clearly distinct types, called kappa and lambda, based on the amino sequences of their constant domain. Depending on the amino acid sequences of the constant domain of their heavy chains, “immunoglobulins” can be assigned to different classes. There are at least five (5) major classes of immunoglobulins: IgA, IgD, IgE, IgG, and IgM, and several of these may be further divided into subclasses (isotypes), e.g., IgG-1, IgG-2, IgG-3, and IgG4; IgA-1 and IgA-2. The subunit structures and three-dimensional configurations of different classes of immunoglobulins are well known.

[0039] As used herein, the term “monoclonal antibody” refers to an antibody obtained from a population of substantially homogeneous antibodies, i.e., the individual antibodies comprising the population are identical except for possible naturally occurring mutations that may be present in minor amounts. Monoclonal antibodies are highly specific, being directed against a single antigenic site. Furthermore, in contrast to conventional (polyclonal) antibody preparations, which typically include different antibodies directed against different determinants (epitopes), each monoclonal antibody is directed against a single determinant on the antigen. In additional to their specificity, the monoclonal antibodies are advantageous in that they are synthesized by the hybridoma culture, uncontaminated by other immunoglobulins. The modifier “monoclonal” indicates the character of the antibody as being obtained from a substantially homogeneous population of antibodies, and is not to be construed as requiring production of the antibody by any particular method. For example, the monoclonal antibodies to be used in accordance with the presently disclosed and claimed invention may be made by the hybridoma method first described by Kohler and Milstein, Nature 256, 495 (1975), relevant portions incorporated herein by reference.

[0040] All monoclonal antibodies used in accordance with the presently disclosed and claimed invention will be either (1) the result of a deliberate immunization protocol, as described in more detail hereinbelow; or (2) the result of an immune response that results in the production of antibodies naturally in the course of a disease or cancer.

[0041] As used herein, the term “binding affinity” refers to the strength of the sum total of noncovalent interactions between a single binding site of a molecule (e.g., an antibody or other binding molecule) and its binding partner (e.g., an antigen or receptor). The affinity of a molecule X for its partner Y can generally be represented by the dissociation constant (Kd). Affinity can be measured by common methods known in the art, including those described herein. Low-affinity antibodies bind antigen (or receptor) weakly and tend to dissociate readily, whereas high-affinity antibodies bind antigen (or receptor) more tightly and remain bound longer. In the case of antibodies, the antigen binding site binds to its cognate epitope.

[0042] As used herein, the terms “cancer,” “neoplasm,” and “tumor” are used interchangeably to refer to cells that exhibit autonomous, unregulated growth, such that they exhibit an aberrant growth phenotype characterized by a significant loss of control over cell proliferation. Cells of interest for detection, analysis, or treatment in the present application include precancerous (e.g., benign), malignant, pre-metastatic, metastatic, and non-metastatic cells. Cancers of virtually every tissue are known. As used herein, the phrase “cancer burden” refers to the number of cancer cells or cancer volume in a subject. Reducing a cancer burden refers to reducing the number of cancer cells or the cancer volume in a subject. As used herein, the term “cancer cell” refers to any cell that is a cancer cell or is derived from a cancer cell, e.g., a clone of a cancer cell. Many types of cancers are known to those of skill in the art, including solid tumors such as carcinomas, sarcomas, glioblastomas, melanomas, lymphomas, myelomas, etc., and circulating cancers such as leukemias, including specifically B cell leukemias, T cell leukemias, etc. Examples of cancer that may be treated with the anti-CD3 antibodies include but are not limited to, ovarian cancer, breast cancer, colon cancer, lung cancer, prostate cancer, hepatocellular cancer, gastric cancer, pancreatic cancer, cervical cancer, ovarian cancer, liver cancer, bladder cancer, cancer of the urinary tract, thyroid cancer, renal cancer, carcinoma, melanoma, head and neck cancer, and brain cancer.

[0043] The uses of the monoclonal antibodies of the presently disclosed and claimed invention may require administration of such or similar monoclonal antibody to a subject, such as a human. However, when the monoclonal antibodies are produced in a non-human animal, such as a rodent or chicken, administration of such antibodies to a human patient will normally elicit an immune response, wherein the immune response is directed towards the antibodies themselves. Such reactions limit the duration and effectiveness of such a therapy. In order to overcome such problem, the monoclonal antibodies of the presently disclosed and claimed invention can be “humanized”, that is, the antibodies are engineered such that antigenic portions thereof are removed and like portions of a human antibody are substituted therefore, while the antibodies' affinity for the CD3 is retained. This engineering may only involve a few amino acids, or may include entire framework regions of the antibody, leaving only the complementarity determining regions of the antibody intact. Several methods of humanizing antibodies are known in the art and are disclosed in U.S. Pat. No. 6,180,370, issued to Queen et al on Jan. 30, 2001; U.S. Pat. No. 6,054,927, issued to Brickell on Apr. 25, 2000; U.S. Pat. No. 5,869,619, issued to Studnicka on Feb. 9, 1999; U.S. Pat. No. 5,861,155, issued to Lin on Jan. 19, 1999; U.S. Pat. No. 5,712,120, issued to Rodriquez et al on Jan. 27, 1998; and U.S. Pat. No. 4,816,567, issued to Cabilly et al on Mar. 28, 1989, relevant portions incorporated herein by reference.

[0044] Humanized forms of antibodies are chimeric immunoglobulins, immunoglobulin chains or fragments thereof (such as Fab, Fab′, F(ab′)2, Fv, scFv or other antigen-binding subsequences of antibodies) that are principally comprised of the sequence of a human immunoglobulin, and contain minimal sequence derived from a non-human immunoglobulin. Humanization can be performed following the method of Winter and co-workers (Jones et al., 1986; Riechmann et al., 1988; Verhoeyen et al., 1988), by substituting nonhuman (i.e., rodent, chicken) CDRs or CDR sequences for the corresponding sequences of a human antibody, see, e.g., U.S. Pat. No. 5,225,539. In some instances, Fv framework residues of the human immunoglobulin are replaced by corresponding non-human residues from the donor antibody. Humanized antibodies can also comprise residues that are found neither in the recipient antibody nor in the imported CDR or framework sequences. In general, the humanized antibody will comprise substantially all of, at least one, and typically two, variable domains, in which all or substantially all of the CDR regions correspond to those of a non-human immunoglobulin and all or substantially all of the framework regions are those of a human immunoglobulin consensus sequence. The humanized antibody optimally also will comprise at least a portion of an immunoglobulin constant region (Fc), typically that of a human immunoglobulin.

[0045] As used herein, the term “chimeric” antibody refers to a portion of the heavy and/or light chain that is identical with or homologous to corresponding sequences in antibodies derived from a particular species or belonging to a particular antibody class or subclass, while the remainder of the chain(s) is identical with or homologous to corresponding sequences in antibodies derived from another species or belonging to another antibody class or subclass, as well as fragments of such antibodies, so long as they exhibit the desired biological activity. A chimeric antibody will have two distinct antigen binding sites, which may be against the same or different antigens.

[0046] Antibody fragments of the disclosure retain anti-CD3 antigen binding specificity. Antibody fragments include antigen-binding fragments (Fab), variable fragments (Fv) containing VH and VL sequences, single chain variable fragments (scFv) containing VH and VL sequences linked together in one chain, single chain antibody fragments (scAb) or other antibody variable region fragments, such as retaining antigen binding specificity.

[0047] The term “meso scale-molecule (MEM)” as used herein throughout includes engineered peptides and polypeptides between about 1 kDa and about 10 kDa. The term “MEM-nanoparticle” as used herein throughout includes MEMs which have been conjugated to a nanoparticle (e.g., ferritin nanoparticle).

[0048] As used herein, a “subject” may be a mammalian subject. Mammalian subjects include, humans, non-human primates, rodents, (e.g., rats, mice), lagomorphs (e.g., rabbits), ungulates (e.g., cows, sheep, pigs, horses, goats, and the like), etc. In some embodiments, the subject is a human. In some embodiments, the subject is a non-human primate, for example a cynomolgus monkey. In some embodiments, the subject is a companion animal (e.g., cats, dogs).

[0049] The presently disclosed and claimed invention further includes the use of fully human monoclonal antibodies cross-reactive against CD3. Fully human antibodies essentially relate to antibody molecules in which the entire sequence of both the light chain and the heavy chain, including the CDRs, arise from human genes. Such antibodies are termed “human antibodies” or “fully human antibodies” herein. Human monoclonal antibodies can be prepared by, e.g., the trioma technique; the human B-cell hybridoma technique (see Kozbor, et al., Hybridoma, 2:7 (1983)) and the EBV hybridoma technique to produce human monoclonal antibodies (see Cole, et al., PNAS 82:859 (1985)), or as taught herein. Human monoclonal antibodies may be utilized in the practice of the presently disclosed and claimed invention and may be produced by using human hybridomas (see Cote, et al., PNAS 80:2026 (1983)) or by transforming human B-cells with Epstein Barr Virus in vitro (see Cole, et al., 1985), relevant portions incorporated herein by reference.

[0050] In addition, human antibodies can be made by introducing human immunoglobulin loci into transgenic animals, e.g., mice in which the endogenous immunoglobulin genes have been partially or completely inactivated. Upon challenge, human antibody production is observed, which closely resembles that seen in humans in all respects, including gene rearrangement, assembly, and antibody repertoire. This approach is described, for example but not by way of limitation, in U.S. Pat. Nos. 5,545,807; 5,545,806; 5,569,825; 5,625,126; 5,633,425; 5,661,016, and in Marks et al., J Biol. Chem. 267:16007, (1992); Lonberg et al., Nature, 368:856 (1994); Morrison, 1994; Fishwild et al., Nature Biotechnol. 14:845 (1996); Neuberger, Nat. Biotechnol. 14:826 (1996); and Lonberg and Huszar, Int Rev Immunol. 13:65 (1995), relevant portions incorporated herein by reference.

[0051] A method for producing an antibody of interest, such as a human antibody, is disclosed in U.S. Pat. No. 5,916,771, issued to Hori et al. on Jun. 29, 1999, and incorporated herein by reference. It includes introducing an expression vector that contains a nucleotide sequence encoding a heavy chain into one mammalian host cell in culture, introducing an expression vector containing a nucleotide sequence encoding a light chain into another mammalian host cell, and fusing the two cells to form a hybrid cell. The hybrid cell expresses an antibody containing the heavy chain and the light chain.

[0052] As used herein, the term “vector” refers to a nucleic acid molecule capable of transporting another nucleic acid to which it has been linked. One type of vector is a “plasmid”, which refers to a circular double-stranded DNA into which additional DNA segments are inserted. Another type of vector is a viral vector in which DNA segments are inserted into a viral genome. Certain vectors are capable of autonomous replication in a host cell into which they are introduced (e.g., bacterial vectors having a bacterial and an episomal origin of replication, or non-episomal mammalian vectors can be integrated into the genome of a host cell upon introduction into the host cell, and thereby are replicated along with the host genome. Certain vectors are capable of directing the expression of genes to which they are operably linked. Such vectors are referred to herein as “recombinant expression vectors” (or simply, “recombinant vectors”). Generally, expression vectors useful for expression in mammalian cells using recombinant DNA techniques are often in the form of plasmids.

[0053] As used herein, the term “host cell” or “recombinant host cell” refer to a cell that has been genetically altered, or is capable of being genetically altered by introduction of an exogenous polynucleotide, such as a recombinant plasmid or vector. A host cell refers not only to a particular subject cell but also to the progeny of such a host cell. Because certain modifications may occur in succeeding generations due to either mutation or environmental influences, such progeny may not, in fact, be identical to the parent cell, but are still included within the scope of the term host cell.

[0054] As used herein, the term “treatment” refers to both therapeutic treatment and prophylactic or preventative measures. Those in need of treatment include those already with the disease or disorder as well as those in which the disorder is to be prevented. The effect may be prophylactic in terms of completely or partially preventing a disease or symptom thereof and/or may be therapeutic in terms of a partial or complete cure for a disease and/or adverse effects attributable to the disease. A “treatment” refers to any treatment of a disease or disorder in a mammal and includes: (a) preventing the disease from occurring in a subject that may be predisposed to the disease but has not yet been diagnosed as having it; (b) relieving the disease, i.e., causing regression of the disease; or (c) inhibiting the disease, i.e., arresting its development. The therapeutic agent may be administered before, during, or after the onset of disease or injury. The treatment of ongoing disease, where the treatment stabilizes or reduces the undesirable clinical symptoms of the patient, is of particular interest. Such treatment is desirably performed prior to the complete loss of function in the affected tissues. The subject therapy may be administered during the symptomatic stage of the disease, and in some cases after the symptomatic stage of the disease. Treatment may be delivered prophylactically (prior to showing signs of an autoimmune disease or cancer) or therapeutically (following the presence of an autoimmune disease or cancer).

[0055] As used herein, the term “disorder” refers to any condition that would benefit from treatment with the anti-CD3 antibody or fragments thereof. This includes chronic and acute disorders or diseases including those infectious or pathological conditions that predispose the mammal to the disorder in question.

[0056] An antibody or antibody fragment can be generated with an engineered sequence or glycosylation state to confer preferred levels of activity in antibody-dependent cellular cytotoxicity (ADCC), antibody-dependent cellular phagocytosis (ADCP), antibody-dependent neutrophil phagocytosis (ADNP), or antibody-dependent complement deposition (ADCD) functions as measured by bead-based or cell-based assays or in vivo studies in animal models.

[0057] Alternatively, or additionally, it may be useful to combine amino acid modifications with one or more further amino acid modifications that alter complement component Clq binding and/or the complement-dependent cytotoxicity (CDC) function of the Fc region of an IL-23p19 binding molecule. The binding polypeptide of particular interest may be one that binds to Clq and displays complement-dependent cytotoxicity. Polypeptides with pre-existing Clq binding activity, optionally further having the ability to mediate CDC may be modified such that one or both of these activities are enhanced. Amino acid modifications that alter Clq and/or modify its complement-dependent cytotoxicity function are described, for example, in W0/0042072, which is hereby incorporated by reference.

[0058] An Fc region of an antibody can be designed to alter the effector function, e.g., by modifying Clq binding and/or FcγR binding and thereby changing complement-dependent cytotoxicity (CDC) activity and/or antibody-dependent cell-mediated cytotoxicity (ADCC) activity. These “effector functions” are responsible for activating or diminishing a biological activity (e.g., in a subject). Examples of effector functions include, but are not limited to: Clq binding; CDC; Fc receptor binding; ADCC; phagocytosis; down-regulation of cell surface receptors (e.g., B cell receptor; BCR), etc. Such effector functions may require the Fc region to be combined with a binding domain (e.g., an antibody variable domain) and can be assessed using various assays (e.g., Fc binding assays, ADCC assays, CDC assays, etc.).

[0059] The Fc region can be a wild-type Fc region, a mutated Fc region, a monomeric wild-type Fc region, a monomeric mutant Fc region, a dimeric wild-type Fc region, or a dimeric mutant Fc region, a second variable heavy region and a second Fc region, or a second variable heavy region and a second Fc region, and may further include an uncleavable flexible linker and a second variable light region and a second heavy variable region, or a second Fc region and an uncleavable flexible linker and payload, such as a toxin, a cytokine, an anti-cancer agent, or another antibody.

[0060] Non-limiting examples of payload include, e.g., cytotoxic proteins or peptides include a bacterial cytotoxin such as an alpha-pore forming toxin (e.g., cytolysin A from E. coli), a beta-pore-forming toxin (e.g., α-Hemolysin, PVL-panton Valentine leukocidin, acrolysin, clostridial Epsilon-toxin, Clostridium perfringens enterotoxin), binary toxins (anthrax toxin, edema toxin, C. botulinum C2 toxin, C spirofome toxin, C. perfringens iota toxin, C. difficile cyto-lethal toxins (A and B)), prion, parasporin, a cholesterol-dependent cytolysins (e.g., pneumolysin), a small pore-forming toxin (e.g., Gramicidin A), a cyanotoxin (e.g., microcystins, nodularins), a hemotoxin, a neurotoxin (e.g., botulinum neurotoxin), a cytotoxin, cholera toxin, diphtheria toxin, Pseudomonas exotoxin A, tetanus toxin, or an immunotoxin (idarubicin, ricin A, CRM9, Pokeweed antiviral protein, DT). Exemplary apoptotic triggering proteins or peptides include apoptotic protease activating factor-1 (Apaf-1), cytochrome-c, caspase initiator proteins (CASP2, CASP8, CASP9, CASP10), apoptosis inducing factor (AIF), p53, p73, p63, Bcl-2, Bax, granzyme B, poly-ADP ribose polymerase (PARP), and P 21-activated kinase 2 (PAK2).

[0061] The payload can also be a cytotoxic agent, such as doxorubicin (adriamycin), gemcitabine (gemzar), daunorubicin, procarbazine, mitomycin, cytarabine, ctoposide, methotrexate, venorelbine, 5-fluorouracil (5-FU), vinca alkaloids such as vinblastine or vincristine; bleomycin, paclitaxel (taxol), docetaxel (taxotere), aldesleukin, asparaginase, busulfan, carboplatin, cladribine, camptothecin, CPT-11, 1O-hydroxy-7-ethylcamptothecin (SN38), dacarbazine, S-I capecitabine, ftorafur, 5′deoxyfluorouridine, UFT, eniluracil, deoxycytidine, 5-azacytosine, 5-azadeoxycytosine, allopurinol, 2-chloroadenosine, trimetrexate, aminopterin, methylene-10-deazaminopterin (MDAM), oxaplatin, picoplatin, tetraplatin, satraplatin, platinum-DACH, ormaplatin, CI-973, JM-216, and analogs thereof, epirubicin, etoposide phosphate, 9-aminocamptothecin, 10,11-methylenedioxycamptothecin, karenitecin, 9-nitrocamptothecin, TAS 103, vindesine, L-phenylalanine mustard, ifosphamidemefosphamide, perfosfamide, trophosphamide carmustine, semustine, epothilones A-E, tomudex, 6-mercaptopurine, 6-thioguanine, amsacrine, etoposide phosphate, karenitecin, acyclovir, valacyclovir, ganciclovir, amantadine, rimantadine, lamivudine, zidovudine, bevacizumab, trastuzumab, rituximab, 5-Fluorouracil, and combinations thereof.

[0062] Non-limiting examples of cytokines include: growth hormone; parathyroid hormone; thyroxine; insulin; proinsulin; relaxin; prorelaxin; glycoprotein hormones; hepatic growth factor; fibroblast growth factor; prolactin; placental lactogen; TNF-α; mullerian-inhibiting substance; gonadotropin-associated peptide; inhibin; activin; vascular endothelial growth factor; integrin; thrombopoietin (TPO); nerve growth factors; platelet-growth factor; placental growth factor, transforming growth factors (TGFs); insulin-like growth factor-1 and -11; erythropoietin (EPO); osteoinductive factors; interferons; colony stimulating factors (CSFs); lymphotoxin-alpha; lymphotoxin-beta; CD27L; CD30L; FASL; 4-1 BBL; OX40L; TRAIL; IL-1; IL-2; IL-3; IL-4; IL-5; IL-6; IL-7; IL-8; IL-9; IL-10; IL-11; IL-12; IL-13; IL-15; IL-18; IL-21; IL-22; IL-23; IL-33; IFN-α; IFN-b; IFN-g; IFN-g inducing factor (IGIF); bone morphogenetic protein (BMP); leukemia inhibitory factor (LIF); or kit ligand (KL).

[0063] Non-limiting examples of anti-cancer drug include, e.g., dihydroxyvitamin D3, 4-ipomcanol, 5-ethynyluracil, 9-dihydrotaxol, abiraterone, acivicin, aclarubicin, acodazole hydrochloride, acronine, acylfiilvene, adecypenol, adozelesin, aldesleukin, all-tk antagonists, altretamine, ambamustine, ambomycin, ametantrone acetate, amidox, amifostine, aminoglutethimide, aminolevulinic acid, amrubicin, amsacrine, anagrelide, anastrozole, andrographolide, angiogenesis inhibitors, antagonist D, antagonist G, antarelix, anthramycin, anti-dorsalizdng morphogenetic protein-1, antiestrogen, antineoplaston, antisense oligonucleotides, aphidicolin glycinate, apoptosis gene modulators, apoptosis regulators, apurinic acid, ARA-CDP-DLPTBA, arginine deaminase, asparaginase, asperlin, asulacrine, atamestane, atrimustine, axinastatin 1, axinastatin 2, axinastatin 3, azacitidine, azasetron, azatoxin, azatyrosine, azetepa, azotomycin, baccatin III derivatives, balanol, batimastat, benzochlorins, benzodepa, benzoylstaurosporine, beta lactam derivatives, beta-alethine, betaclamycin B, betulinic acid, BFGF inhibitor, bicalutamide, bisantrene, bisantrene hydrochloride, bisazuidinylspermine, bisnafide, bisnafide dimesylate, bistratene A, bizelesin, bleomycin, bleomycin sulfate, BRC/ABL antagonists, breflate, brequinar sodium, bropirimine, budotitane, busulfan, buthionine sulfoximine, cactinomycin, calcipotriol, calphostin C, calusterone, camptothecin derivatives, canarypox IL-2, capecitabine, caraceraide, carbetimer, carboplatin, carboxamide-amino-triazole, carboxyamidotriazole, carest M3, carmustine, carn 700, cartilage derived inhibitor, carubicin hydrochloride, carzelesin, casein kinase inhibitors, castanosperrnine, cecropin B, cedefingol, cetrorelix, chlorambucil, chlorins, chloroquinoxaline sulfonamide, cicaprost, cirolemycin, cisplatin, cis-porphyrin, cladribine, clomifene analogs, clotrimazole, collismycin A, collismycin B, combretastatin A4, combretastatin analog, conagenin, crambescidin 816, crisnatol, crisnatol mesylate, cryptophycin 8, cryptophycin A derivatives, curacin A, cyclopentanthraquinones, cyclophosphamide, cycloplatam, cypemycin, cytarabine, cytarabine ocfosfate, cytolytic factor, cytostatin, dacarbazine, dacliximab, dactinomycin, daunorubicin hydrochloride, decitabine, dehydrodidemnin B, deslorelin, dexifosfamide, dexormaplatin, dexrazoxane, dexverapamil, dezaguanine, dezaguanine mesylate, diaziquone, didemnin B, didox, diethyhiorspermine, dihydro-5-azacytidine, dioxamycin, diphenyl spiromustine, docetaxel, docosanol, dolasetron, doxifluridine, doxorubicin, doxorubicin hydrochloride, droloxifene, droloxifene citrate, dromostanolone propionate, dronabinol, duazomycin, duocannycin SA, ebselen, ecomustine, edatrexate, edelfosine, edrecolomab, eflomithine, eflomithine hydrochloride, elemene, elsarnitrucin, emitefur, enloplatin, enpromate, epipropidine, epirubicin, epirubicin hydrochloride, epristeride, erbulozole, erythrocyte gene therapy vector system, esorubicin hydrochloride, estramustine, estramustine analog, estramustine phosphate sodium, estrogen agonists, estrogen antagonists, etanidazole, etoposide, etoposide phosphate, etoprine, exemestane, fadrozole, fadrozole hydrochloride, fazarabine, fenretinide, filgrastim, finasteride, flavopiridol, flezelastine, floxuridine, fluasterone, fludarabine, fludarabine phosphate, fluorodaunorunicin hydrochloride, fluorouracil, fluorocitabine, forfenimex, formestane, fosquidone, fostriecin, fostriecin sodium, fotemustine, gadolinium texaphyrin, gallium nitrate, galocitabine, ganirelix, gelatinase inhibitors, gemcitabine, gemcitabine hydrochloride, glutathione inhibitors, hepsulfam, heregulin, hexamethylene bisacetamide, hydroxyurea, hypericin, ibandronic acid, idarubicin, idarubicin hydrochloride, idoxifene, idramantone, ifosfamide, ihnofosine, ilomastat, imidazoacridones, imiquimod, immunostimulant peptides, insulin-like growth factor-1 receptor inhibitor, interferon agonists, interferon alpha-2A, interferon alpha-2B, interferon alpha-NI, interferon alpha-N3, interferon beta-IA, interferon gamma-IB, interferons, interleukins, iobenguane, iododoxorubicin, iproplatm, irinotecan, irinotecan hydrochloride, iroplact, irsogladine, isobengazole, isohomohalicondrin B, itasetron, jasplakinolide, kahalalide F, lamellarin-N triacetate, lanreotide, lanreotide acetate, leinamycin, lenograstim, lentinan sulfate, leptolstatin, letrozole, leukemia inhibiting factor, leukocyte alpha interferon, leuprolide acetate, leuprolide/estrogen/progesterone, leuprorelin, levamisole, liarozole, liarozole hydrochloride, linear polyamine analog, lipophilic disaccharide peptide, lipophilic platinum compounds, lissoclinamide, lobaplatin, lombricine, lometrexol, lometrexol sodium, lomustine, lonidamine, losoxantrone, losoxantrone hydrochloride, lovastatin, loxoribine, lurtotecan, lutetium texaphyrin lysofylline, lytic peptides, maitansine, mannostatin A, marimastat, masoprocol, maspin, matrilysin inhibitors, matrix metalloproteinase inhibitors, maytansine, mechlorethamine hydrochloride, megestrol acetate, melengestrol acetate, melphalan, menogaril, merbarone, mercaptopurine, meterelin, methioninase, methotrexate, methotrexate sodium, metoclopramide, metoprine, meturedepa, microalgal protein kinase C inhibitors, MIF inhibitor, mifepristone, miltefosine, mirimostim, mismatched double stranded RNA, mitindomide, mitocarcin, mitocromin, mitogillin, mitoguazone, mitolactol, mitomalcin, mitomycin, mitomycin analogs, mitonafide, mitosper, mitotane, mitotoxin fibroblast growth factor-saporin, mitoxantrone, mitoxantrone hydrochloride, mofarotene, molgramostim, monoclonal antibody, human chorionic gonadotrophin, monophosphoryl lipid a/myobacterium cell wall SK, mopidamol, multiple drug resistance gene inhibitor, multiple tumor suppressor 1-based therapy, mustard anticancer agent, mycaperoxide B, mycobacterial cell wall extract, mycophenolic acid, myriaporone, n-acetyldinaline, nafarelin, nagrestip, naloxone/pentazocine, napavin, naphterpin, nartograstim, nedaplatin, nemorubicin, neridronic acid, neutral endopeptidase, nilutamide, nisamycin, nitric oxide modulators, nitroxide antioxidant, nitrullyn, nocodazole, nogalamycin, n-substituted benzamides, 06-benzylguanine, octreotide, okicenone, oligonucleotides, onapristone, ondansetron, oracin, oral cytokine inducer, ormaplatin, osaterone, oxaliplatin, oxaunomycin, oxisuran, paclitaxel, paclitaxel analogs, paclitaxel derivatives, palauamine, palmitoylrhizoxin, pamidronic acid, panaxytriol, panomifene, parabactin, pazelliptine, pegaspargase, peldesine, peliomycin, pentamustine, pentosan polysulfate sodium, pentostatin, pentrozole, peplomycin sulfate, perflubron, perfosfamide, perillyl alcohol, phenazinomycin, phenylacetate, phosphatase inhibitors, picibanil, pilocarpine hydrochloride, pipobroman, piposulfan, pirarubicin, piritrexim, piroxantrone hydrochloride, placetin A, placetin B, plasminogen activator inhibitor, platinum complex, platinum compounds, platinum-triamine complex, plicamycin, plomestane, porfimer sodium, porfiromycin, prednimustine, procarbazine hydrochloride, propyl bis-acridone, prostaglandin J2, prostatic carcinoma antiandrogen, proteasome inhibitors, protein A-based immune modulator, protein kinase C inhibitor, protein tyrosine phosphatase inhibitors, purine nucleoside phosphorylase inhibitors, puromycin, puromycin hydrochloride, purpurins, pyrazorurin, pyrazoloacridine, pyridoxylated hemoglobin polyoxyethylene conjugate, RAF antagonists, raltitrexed, ramosetron, RAS farnesyl protein transferase inhibitors, RAS inhibitors, RAS-GAP inhibitor, retelliptine demethylated, rhenium RE 186 etidronate, rhizoxin, riboprine, ribozymes, RH retinamide, RNAi, rogletimide, rohitukine, romurtide, roquinimex, rubiginone Bl, ruboxyl, safingol, safingol hydrochloride, saintopin, sarcnu, sarcophytol A, sargramostim, SDI1 mimetics, semustine, senescence derived inhibitor 1, sense oligonucleotides, signal transduction inhibitors, signal transduction modulators, simtrazene, single chain antigen binding protein, sizofiran, sobuzoxane, sodium borocaptate, sodium phenylacetate, solverol, somatomedin binding protein, sonermin, sparfosafe sodium, sparfosic acid, sparsomycin, spicamycin D, spirogermanium hydrochloride, spiromustine, spiroplatin, splenopentin, spongistatin 1, squalamine, stem cell inhibitor, stem-cell division inhibitors, stipiamide, streptonigrin, streptozocin, stromelysin inhibitors, sulfinosine, sulofenur, superactive vasoactive intestinal peptide antagonist, suradista, suramin, swainsonine, synthetic glycosaminoglycans, talisomycin, tallimustine, tamoxifen methiodide, tauromustine, tazarotene, tecogalan sodium, tegafur, tellurapyrylium, telomerase inhibitors, teloxantrone hydrochloride, temoporfin, temozolomide, teniposide, teroxirone, testolactone, tetrachlorodecaoxide, tetrazomine, thaliblastine, thalidomide, thiamiprine, thiocoraline, thioguanine, thiotepa, thrombopoietin, thrombopoietin mimetic, thymalfasin, thymopoietin receptor agonist, thymotrinan, thyroid stimulating hormone, tiazofurin, tin ethyl etiopurpurin, tirapazamine, titanocene dichloride, topotecan hydrochloride, topsentin, toremifene, toremifene citrate, totipotent stem cell factor, translation inhibitors, trestolone acetate, tretinoin, triacetyluridine, triciribine, triciribine phosphate, trimetrexate, trimetrexate glucuronate, triptorelin, tropisetron, tubulozole hydrochloride, turosteride, tyrosine kinase inhibitors, tyrphostins, UBC inhibitors, ubenimex, uracil mustard, uredepa, urogenital sinus-derived growth inhibitory factor, urokinase receptor antagonists, vapreotide, variolin B, velaresol, veramine, verdins, verteporfin, vinblastine sulfate, vincristine sulfate, vindesine, vindesine sulfate, vinepidine sulfate, vinglycinate sulfate, vinleurosine sulfate, vinorelbine or vinorelbine tartrate, vinrosidine sulfate, vinxaltine, vinzolidine sulfate, vitaxin, vorozole, zanoterone, zeniplatin, zilascorb, zinostatin, zinostatin stimalamer, or zorubicin hydrochloride.

[0064] For example, one can generate a variant Fc region of an antibody with improved Clq binding and improved FcγRIII binding (e.g., having both improved ADCC activity and improved CDC activity). Alternatively, if it is desired that effector function be reduced or ablated, a variant Fc region can be engineered with reduced CDC activity and/or reduced ADCC activity. In other embodiments, only one of these activities may be increased, and, optionally, also the other activity reduced (e.g., to generate an Fc region variant with improved ADCC activity, but reduced CDC activity and vice versa).

[0065] A single chain variable fragment (scFv) is a fusion of the variable regions of the heavy and light chains of immunoglobulins, linked together with a short (usually serine, glycine) linker. This chimeric molecule retains the specificity of the original immunoglobulin, despite removal of the constant regions and the introduction of a linker peptide. This modification usually leaves the specificity unaltered. These molecules were created historically to facilitate phage display where it is highly convenient to express the antigen-binding domain as a single peptide. Alternatively, scFv can be created directly from subcloned heavy and light chains derived from a hybridoma or B cell. Single chain variable fragments lack the constant Fc region found in complete antibody molecules, and thus, the common binding sites (e.g., protein A/G) used to purify antibodies. These fragments can often be purified/immobilized using Protein L since Protein L interacts with the variable region of kappa light chains.

[0066] Flexible linkers generally are comprised of helix- and turn-promoting amino acid residues such as alanine, serine, and glycine. However, other residues can function as well. Phage display can be used to rapidly select tailored linkers for single-chain antibodies (scFvs) from protein linker libraries. A random linker library was constructed in which the genes for the heavy and light chain variable domains were linked by a segment encoding an 18-amino acid polypeptide of variable composition. The scFv repertoire (approx. 5×106 different members) is displayed on filamentous phage and subjected to affinity selection with hapten. The population of selected variants exhibited significant increases in binding activity but retained considerable sequence diversity. Sequence analysis revealed a conserved proline in the linker two residues after the VH C terminus and an abundance of arginines and prolines at other positions as the only common features of the selected tethers. In certain embodiments, the antibody fragments are further modified to increase their serum half-life by using modified Fc regions or mutations to the various constant regions, as are known in the art.

[0067] In certain embodiments, the antibodies of the present invention are formulated for administration to humans. For example, the antibodies of the present invention can be included in a pharmaceutical composition formulated for an administration that is: intranasal, intrapulmonary, intrabronchial, intravenous, oral, intraadiposal, intraarterial, intraarticular, intracranial, intradermal, intralesional, intramuscular, intrapericardial, intraperitoneal, intrapleural, intravesicular, local, mucosal, parenteral, enteral, subcutaneous, sublingual, topical, transbuccal, transdermal, via inhalation, via injection, in creams, in lipid compositions, via a catheter, via a lavage, via continuous infusion, via infusion, via local delivery, or via localized perfusion, and wherein the composition is a serum, drop, gel, ointment, spray, reservoir, or mist.

[0068] As used herein, the term “antigen” refers to a molecule containing one or more epitopes (cither linear, conformational or both) that will stimulate a host's immune-system to make a humoral and/or cellular antigen-specific response. The term is used interchangeably with the term “immunogen.” Normally, a B-cell epitope will include at least about 5 amino acids but can be as small as 3-4 amino acids. A T-cell epitope, such as a CTL epitope, will include at least about 7-9 amino acids, and a helper T-cell epitope at least about 12-20 amino acids. Normally, an epitope will include between about 7 and 15 amino acids, such as, 9, 10, 12 or 15 amino acids. The term includes polypeptides, which include modifications, such as deletions, additions and substitutions (generally conservative in nature) as compared to a native sequence, so long as the protein maintains the ability to elicit an immunological response, as defined herein. These modifications may be deliberate, as through site-directed mutagenesis, or may be accidental, such as through mutations of hosts, which produce the antigens.

[0069] As used herein, the term “epitope” refers to a specific amino acid sequence or molecule (such as a carbohydrate, small molecule, lipid, etc.) that when present in the proper conformation, provides a reactive site for an antibody (e.g., B cell epitope) or in the case of a peptide to a T cell receptor (e.g., T cell epitope).

[0070] Portions of a given polypeptide that include a B-cell epitope can be identified using any number of epitope mapping techniques that are known in the art. (See, e.g., Epitope Mapping Protocols in Methods in Molecular Biology, Vol. 66, Glenn E. Morris, Ed., 1996, Humana Press, Totowa, N.J.). For example, linear epitopes can be determined by, e.g., concurrently synthesizing large numbers of peptides on solid supports, the peptides corresponding to portions of the protein molecule, and reacting the peptides with antibodies while the peptides are still attached to the supports. Such techniques are known in the art and described in, e.g., U.S. Pat. No. 4,708,871; Geysen et al. (1984) Proc. Natl. Acad Sci. USA 81:3998-4002; Geysen et al. (1986) Molec. Immunol. 23:709-715.

[0071] As used herein, the term “substantially purified” refers to isolation of a substance (compound, polynucleotide, protein, polypeptide, polypeptide composition) such that the substance comprises the majority percent of the sample in which it resides. Typically, in a sample a substantially purified component comprises 50%, preferably 80%-85%, more preferably 90-95% of the sample. Techniques for purifying polynucleotides and polypeptides of interest are well-known in the art and include, for example, ion-exchange chromatography, affinity chromatography and sedimentation according to density.

[0072] The practice of the present invention employs, unless otherwise indicated, conventional methods of chemistry, biochemistry, molecular biology, immunology, and pharmacology, within the skill of the art. Such techniques are explained fully in the literature. Sec, e.g., Remington's Pharmaceutical Sciences, 18th Edition (Easton, Pa.: Mack Publishing Company, 1990); Methods In Enzymology (S. Colowick and N. Kaplan, eds., Academic Press, Inc.); and Handbook of Experimental Immunology, Vols. I-IV (D. M. Weir and C. C. Blackwell, eds., 1986, Blackwell Scientific Publications); Sambrook, et al., Molecular Cloning: A Laboratory Manual (2nd Edition, 1989); Short Protocols in Molecular Biology, 4th ed. (Ausubel et al. eds., 1999, John Wiley & Sons); Molecular Biology Techniques: An Intensive Laboratory Course, (Ream et al., eds., 1998, Academic Press); PCR (Introduction to Biotechniques Series), 2nd ed. (Newton & Graham eds., 1997, Springer Verlag); Fundamental Virology, Second Edition (Fields & Knipe eds., 1991, Raven Press, New York), relevant portion incorporated herein by reference.

[0073] Conservative amino acid substitutions involve replacement of the aliphatic or hydrophobic amino acids Ala, Val, Leu and Ile; replacement of the hydroxyl residues Ser and Thr; replacement of the acidic residues Asp and Glu; replacement of the amide residues Asn and Gln, replacement of the basic residues Lys, Arg, and His; replacement of the aromatic residues Phe, Tyr, and Trp, and replacement of the small-sized amino acids Ala, Ser, Thr, Met, and Gly.

[0074] The skilled artisan will recognize that antibodies that exhibit little or no binding to a target antigen can be described as having a low affinity, and a high equilibrium dissociation constant (KD) for the target antigen. The skilled artisan will also recognize that antibodies that exhibit little or no binding to a collective assembly of target antigenic epitopes can be described as having a low avidity, and a high equilibrium dissociation constant (KD) for the collective assembly of target antigenic epitopes.

[0075] In some embodiments, provided herein are anti-CD3 antibodies having a binding affinity (KD) to CD3 of about 5 μM to about 5 pM, about 1 μM to about 5 pM, about 0.5 μM to about 5 pM, about 0.1 μM to about 5 pM, about 50 nM to about 5 pM, about 10 nM to about 5 pM, about 5 nM to about 5 pM, about InM to about 5 pM, about 0.5 nM to about 5 pM, about 0.1 nM to about 5 pM, about 50 pM to about 5 pM, about 10 pM to about 5 pM.

[0076] In some embodiments, anti-CD3 antibodies have a binding avidity (KD) to CD3 of about 500 nM to about 0.1 pM, about 100 nM to about 0.1 pM, about 50 nM to about 0.1 pM, about 10 nM to about 0.1 pM, about 5 nM to about 0.1 pM, about 1 nM to about 0.1 pM, about 0.5 nM to about 0.1 pM, about 0.1 nM to about 0.1 pM, about 50 pM to about 0.1 pM, about 10 pM to about 0.1 pM, about 5 pM to about 0.1 pM, about 1 pM to about 0.1 pM, about 0.5 pM to about 0.1 pM.

[0077] In some embodiments, anti-CD3 antibodies have a half maximal effective concentration (EC50) to anti-CD3 of about 500 nM to about 0.001 nM, about 100 nM to about 0.001 nM, about 50 nM to about 0.001 nM, about 10 nM to about 0.001 nM, about 5 nM to about 0.001 nM, about 1 nM to about 0.001 nM, about 0.5 nM to about 0.001 nM, about 0.1 nM to about 0.001 nM, about 0.05 nM to about 0.001 nM, about 0.01 nM to about 0.001 nM, about 0.005 nM to about 0.001 nM.

[0078] In some embodiments, the anti-CD3 antibody is a full-length antibody (referring to an antibody with two heavy and two light chains attached to the Fc domain, giving a ‘Y’ shape). In some embodiments the Fc domain (or simply referred to as an Fc) is a human Fc domain. In some embodiments, the Fc domain of an anti-CD3 antibody is from a human IgG1, human IgG2, human IgG3, or human lgG4.

[0079] Provided herein are sequences for exemplary anti-CD3 antibodies of the disclosure. Included are complementarity determining region (CDR) sequences and the variable heavy and light domain sequences (VH, VL) that constitute the CD3 antigen binding domains of the disclosure. The discovery of these antibodies is detailed in the Examples section.

[0080] As referred below, a light chain variable (VL) domain CDR1 region is referred to as CDR-L1; a VL CDR2 region is referred to as CDR-L2; a VL CDR3 region is referred to as CDR-L3; a heavy chain variable (VH) domain CDR1 region is referred to as CDR-H1; a VH CDR2 region is referred to as CDR-H2; and a VH CDR3 region is referred to as CDR-H3. The table herein provide exemplary CDR combinations of antibodies of the disclosure.

[0081] Each antibody arm may be connected by a linker, e.g., a flexible linker. An exemplary linker comprises the following amino acid sequence: GGGGS (SEQ ID NO:2352), GGGGG (SEQ ID NO:2353), or even GGGGSGGGGSGGGGS (SEQ ID NO:2354).

[0082] Uses of anti-CD3 Antibodies. Therapeutic anti-CD3 Antibodies.

[0083] In some embodiments, the anti-CD3 antibodies provided herein are useful for the treatment of a disease or condition involving an immune response. In some embodiments, the anti-CD3 antibodies provided herein are useful for the treatment of an autoimmune disease. An autoimmune disease is generally a harmful immune response to a self-antigen. Examples of autoimmune diseases include, e.g., alopecia, ankylosing spondylitis, atopic dermatitis, celiac disease, Crohn's disease, cutaneous lupus erythematosus (CLE), lupus nephritis, multiple sclerosis, neuromyelitis optica, psoriasis, psoriatic arthritis, rheumatoid arthritis, scleroderma, Sjogren's syndrome, systemic lupus, systemic lupus crythematosus (SLE), temporal arteritis, type I diabetes, ulcerative colitis, uveitis, and vitiligo.

[0084] In some embodiments, the anti-CD3 antibodies provided herein are useful for the treatment of a hyperinflammatory disease. A hyperinflammatory disease consists of a potentially harmful overstimulated immune response. Examples of hyperinflammatory diseases include, e.g., chronic allergy, hypersensitivity vasculitis, and T cell hypersensitivity disease.

[0085] In other embodiments, the anti-CD3 antibodies provided herein are useful for the treatment of cancer. In certain aspect, the anti-CD3 antibodies are used alone or in combination to target the cancer cells. In other example, the anti-CD3 antibodies are used alone or in combination to target regulatory T cells that are reducing or blocking an immune response to the cancer cells.

[0086] Administration of Therapeutic anti-CD3 Antibodies.

[0087] The in vivo administration of the therapeutic anti-CD3 antibodies described herein may be carried out intravenously, intramuscularly, subcutaneously, topically, orally, transdermally, subdermally, intraperitoneally, intraorbitally, intrathecally, intraventricularly, intranasally, transmucosally, through implantation, or through inhalation. Intravenous administration may be carried out via injection or infusion. In some embodiments, the anti-CD3 antibodies of the disclosure are administered intravenously. In some embodiments, the anti-CD3 antibodies of the disclosure are administered subcutaneously. Administration of the therapeutic anti-CD3 antibodies may be performed with any suitable excipients, carriers, or other agents to provide suitable or improved tolerance, transfer, delivery, and the like.

### EXAMPLES

[0088] Engineered Epitope Design. Three engineered epitopes were built to embody solvent-accessible epitopes on the human CD3e and CD3d subunits. The target epitope sequences were PQYPGSEILWQ (SEQ ID NO: 2341) and YPRGSKPEDAN (CD3e residues) (SEQ ID NO: 2342), QDGNEEMGGITQTPYKVSISG (CD3e residues) (SEQ ID NO: 2343), and YRCNGTDIYKDKEST (CD3d residues) (SEQ ID NO: 2344).

[0089] Peptide scaffolds were computationally designed to support the native sequence and structure of the human CD3ed epitopes with the iBio Engineered Epitope machine learning engine. The design process starts with an initial set of blueprints indicating the positions of the scaffold residues to design and the positions of the epitope residues to hold fixed. The machine learning engine optimizes the scaffold residues in these initial blueprints for [1] structural match to the native epitope structure, [2] overall structural stability of the molecule, and [3] solubility of the peptide design. The number of scaffold residues in the blueprints are then iteratively removed until the machine learning engine can no longer satisfy all three of the loss functions described above. The final design is based on the blueprint that satisfies all loss functions using the minimal number of scaffold residues. These final sequence designs are listed in Table 1.

TABLE 1

| Engineered | |
|---|---|
| Epitope ID | Sequence |
| 1 | SPQYPGSEILWQKWGNKKVSYPRGSKPEDAN |
| | (SEQ ID NO: 2345) |
| 2 | QDGNEEMGGITQTPYKVSGSG |
| | (SEQ ID NO: 2346) |
| 3 | YRSNGTDIYKDKEST (SEQ ID NO: 2347) |

[0090] When the engineered epitopes are made by peptide synthesis a cysteine is introduced into the sequence for conjugation to a maleimide-functionalized carrier protein (keyhole limpet hemocyanin or ferritin) for immunizations. Alternatively, the peptides are biotinylated for antibody screening assays (SPR, ELISA, or T-cell activation assays).

[0091] Human CDR Library Designs. Starting with the two benchmark antibodies template Ab1 (Table 2) and template Ab2 (Table 3), the CDR sequences were simultaneously humanized and diversified with the iBio StableHu machine learning engine. The machine learning engine is trained on the Observed Antibody Space (OAS) database with masked language modeling to learn numerical embeddings for the human CDR sequences. These CDR embeddings are then rank ordered by similarity to the benchmark antibody CDR embeddings. This allows for identification of human CDR sequences that may be suitable as substitutes for the benchmark CDRs. The most similar human CDRs identified from the OAS database were used to make CDR libraries with diversities of 1000 or 2000 as shown in Table 4.

TABLE 2

| Chain | Template Ab1 Sequence |
|---|---|
| VH | EVQLVQSGSELKKPGSSVKVSCKASGVTFNSRTFTISWVRQAPGQGLEWL |
| | GSIIPIFGTITYAQKFQGRVTITADKSTSTAFMELTSLRSEDTAIYYCTRRGN |
| | WNPFDPWGQGTLVTVSS (SEQ ID NO: 2348) |
| VL | DIQMTQSPSSLSASVGDRVTITCRASQSISSYLNWYQQKPGKAPKLLIYAA |
| | SSLQSGVPSRFSGSGSGTDFTLTISSLQPEDFATYYCQQSYSTPPTFGQGTK |
| | VEIK (SEQ ID NO: 2349) |

TABLE 3

| Chain | Template Ab2 Sequence |
|---|---|
| VH | EVQLVESGGGLVQPGGSLRLSCAASGFTFNTYAMNWVRQAPGKGLEWV |
| | GRIRSKYNNYATYYADSVKGRFTISRDDSKNTLYLQMNSLRAEDTAVYY |
| | CVRHGNFGNSYVSWFAYWGQGTLVTVSS (SEQ ID NO: 2350) |
| VL | DIQMTQSPSSLSASVGDRVTITCRSSTGAVTTSNYANWVQQKPGKAPKGL |
| | IGGTNKRAPGVPARFSGSGSGTDFTLTISSLQPEDFATYYCALWYSNLWV |
| | FGQGTKVEIK (SEQ ID NO: 2351) |

TABLE 4

| | Template Ab1 | Template Ab2 |
|---|---|---|
| HCDR1 Library | 2000 | 2000 |
| HCDR2 Library | 2000 | 2000 |
| HCDR3 Library | 2000 | 2000 |
| LCDR1 Library | 2000 | 2000 |
| LCDR2 Library | 1000 | 1000 |
| LCDR3 Library | 2000 | 2000 |

[0092] Cell Sorting of Mammalian Display Libraries. CDR libraries were transfected into a mammalian display system for cell sorting. Libraries were sorted by antibody expression (APC-conjugated anti-human Fc secondary) and binding (FITC-conjugated streptavidin-CD3ed/CD3eg complex). Gates were drawn to collect the antibody-expressing populations over a range of binding levels. Sorted cells were pelleted down and stored at −80° C. until further processing.

[0093] NGS Sequencing and Analysis. Sorted cells were sequenced by NGS to identify clone hits. This involved cell lysis, reverse transcription into cDNA, and PCR amplification with primers appropriate for sequencing the DNA library pools on an Illumina MiSeq. Sequences were rank ordered by enrichment of clones in the binding bins compared to non-binding bins in the cell sorting. Enrichment scores were calculated as the frequency of a given sequence in a binding bin divided by its frequency in a non-binding bin. Clones with enrichment scores of 10 or higher were subject to further testing within the capacity of the screening system (up to 10 sequences were tested from each CDR diversity library).

[0094] Immunizations. Engineered epitopes were chemically conjugated to keyhole limpet hemocyanin or ferritin for immunizations (no adjuvants were used). Every week, BALB/c mice were immunized with engineered epitopes one day, and isolated human T-cells on a separate day. After 6-8 weeks of alternating between engineered epitope and T-cell immunizations, mice were immunized with a final boost containing a cocktail of engineered epitopes and human T-cells.

[0095] Hybridoma Generation. Human monoclonal antibodies can be prepared by, e.g., the trioma technique; the human B-cell hybridoma technique (see Kozbor, et al., Hybridoma, 2:7 (1983)) and the EBV hybridoma technique to produce human monoclonal antibodies (see Cole, et al., PNAS 82:859 (1985)), or as taught herein. Human monoclonal antibodies may be utilized in the practice of the presently disclosed and claimed invention and may be produced by using human hybridomas (see Cote, et al., PNAS 80:2026 (1983)) or by transforming human B-cells with Epstein Barr Virus in vitro (see Cole, et al., 1985), relevant portions incorporated herein by reference.

[0096] ELISA CD3 Binding Screen. Antibodies were screened for binding of CD3 heterodimers by ELISA. Biotinylated CD3 epsilon+delta and CD3 epsilon+gamma were coated together in a 1:1 ratio onto streptavidin coated polystyrene assay plates for 1 hour. Plates were washed three times with PBST+1% BSA, and antibodies were incubated for 1 hour, followed by three more washes with PBST+1% BSA. Antibodies were then labeled with a species appropriate secondary antibody conjugated to horse radish peroxidase, and incubated for 1 hour. Plates were then washed three more times with PBST+1% BSA, and TMB substrate was added. After a 10 minute incubation, stop solution was added and absorbance was read out by a plate reader.

[0097] T Cell Binding Screen with Human PBMCs. Antibodies were incubated with Human PBMCs for 1 hour, washed once with DPBS+1% FBS, then labeled with secondary antibodies including anti human CD4, anti-human CD8, and a species appropriate anti-Fc for 1 hour. Cells were then washed twice more and measured by flow cytometry. CD3 binding of antibodies is measured on T cells that are CD4 or CD8 positive within the human PBMC mixture.

[0098] Label-Free CD3 Binding Kinetics as Measured by SPR. Binding kinetics of antibodies to CD3 heterodimers was carried out on a Carterra LSA. Antibodies were captured on an anti-Human Fc functionalized HC200M chip for 25 min, followed by 3 buffer injections to establish a blank, followed by 7 injections of a 1:3 dilution series of CD3 ordered by increasing concentration. Injection cycles consisted of a 60 second baseline, followed by a 4 minute association, followed by a 6 minute dissociation. Kinetic parameters were then fit to the data using the LSA Kinetics software.

[0099] In-Vitro Mammalian Display Library Construction from Mouse B-Cell Repertoires. Splenocytes were collected from mice after immunization, lysed in TRIzol reagent, and RNA collected by Phenol:Chloroform extraction. After reverse transcription, variable heavy and variable light chains were amplified using a primer set designed based on the IMGT database of murine germline sequences (see Schaefer et al., Antibody Engineering Vol. 1 21:42 (2010), relevant portions incorporated by reference) that add adaptors containing IIs restriction enzyme sites that allow assembly into a transmembrane bound mammalian expression plasmid in scFv format. Assembled plasmids are transformed into bacteria and collected after an overnight culture under selection conditions. Recovered plasmids are then transiently transfected into Expi293F expression cell lines to generate a mammalian display library for subsequent sorting.

[0100] FIGS. 1A and 1B illustrates the two paths to anti-CD3 specific antibody discovery (FIG. 1A) and the method of screening (FIG. 1B). FIG. 2 shows the engineered epitopes steered immunization to three CD3E and CD3D epitopes.

[0101] FIG. 3 shows the immunized cohorts CD3 hybridoma primary screens. FIG. 4 is a graph that shows epitope-steered immunization and StableHu generated CD3 hits across a broad binding range. FIG. 5 shows that the StableHu generated a panel of CD3 Hits with a range of binding affinities.

[0102] FIG. 6 shows that the immunized CD3 repertoire was cloned into mammalian display for demultiplexed screening. FIG. 7 shows the results from the first round of mammalian display screening of multi-epitope immunized CD3 repertoire. FIG. 8 shows the results from the second round of immunized CD3 mammalian display repertoire that is significantly enriched to binders. FIG. 9 shows that the ELISA screening identifies Hu-Cyno cross-reactive T-Cell binders.

[0103] FIG. 10 shows that StableHu generates a library of Hu-Cyno cross-reactivity from anti-CD3 murine CDR template. Significant overlap in Hu-Cyno library binding distributions, ˜50-fold binding range for 86 fully human CDR hits in-testing.

[0104] FIG. 11 shows cell sorting identifies range of Hu-Cyno Cross Reactive CD3 binders, with sequences rank-ordered from bin-weight analysis.

Lengthy table referenced here
US20240327515A1-20241003-T00001
Please refer to the end of the specification for access instructions.

Lengthy table referenced here
US20240327515A1-20241003-T00002
Please refer to the end of the specification for access instructions.

Lengthy table referenced here
US20240327515A1-20241003-T00003
Please refer to the end of the specification for access instructions.

Lengthy table referenced here
US20240327515A1-20241003-T00004
Please refer to the end of the specification for access instructions.

Lengthy table referenced here
US20240327515A1-20241003-T00005
Please refer to the end of the specification for access instructions.

Lengthy table referenced here
US20240327515A1-20241003-T00006
Please refer to the end of the specification for access instructions.

Lengthy table referenced here
US20240327515A1-20241003-T00007
Please refer to the end of the specification for access instructions.

Lengthy table referenced here
US20240327515A1-20241003-T00008
Please refer to the end of the specification for access instructions.

Lengthy table referenced here
US20240327515A1-20241003-T00009
Please refer to the end of the specification for access instructions.

[0105] It is contemplated that any embodiment discussed in this specification can be implemented with respect to any method, kit, reagent, or composition of the invention, and vice versa. Furthermore, compositions of the invention can be used to achieve methods of the invention.

[0106] It will be understood that particular embodiments described herein are shown by way of illustration and not as limitations of the invention. The principal features of this invention can be employed in various embodiments without departing from the scope of the invention. Those skilled in the art will recognize, or be able to ascertain using no more than routine experimentation, numerous equivalents to the specific procedures described herein. Such equivalents are considered to be within the scope of this invention and are covered by the claims.

[0107] All publications and patent applications mentioned in the specification are indicative of the level of skill of those skilled in the art to which this invention pertains. All publications and patent applications are herein incorporated by reference to the same extent as if each individual publication or patent application was specifically and individually indicated to be incorporated by reference.

[0108] The use of the word “a” or “an” when used in conjunction with the term “comprising” in the claims and/or the specification may mean “one,” but it is also consistent with the meaning of “one or more,” “at least one,” and “one or more than one.” The use of the term “or” in the claims is used to mean “and/or” unless explicitly indicated to refer to alternatives only or the alternatives are mutually exclusive, although the disclosure supports a definition that refers to only alternatives and “and/or.” Throughout this application, the term “about” is used to indicate that a value includes the inherent variation of error for the device, the method being employed to determine the value, or the variation that exists among the study subjects.

[0109] As used in this specification and claim(s), the words “comprising” (and any form of comprising, such as “comprise” and “comprises”), “having” (and any form of having, such as “have” and “has”), “including” (and any form of including, such as “includes” and “include”) or “containing” (and any form of containing, such as “contains” and “contain”) are inclusive or open-ended and do not exclude additional, unrecited elements or method steps. In embodiments of any of the compositions and methods provided herein, “comprising” may be replaced with “consisting essentially of” or “consisting of”. As used herein, the phrase “consisting essentially of” requires the specified integer(s) or steps as well as those that do not materially affect the character or function of the claimed invention. As used herein, the term “consisting” is used to indicate the presence of the recited integer (e.g., a feature, an element, a characteristic, a property, a method/process step or a limitation) or group of integers (e.g., feature(s), element(s), characteristic(s), propertie(s), method/process steps or limitation(s)) only.

[0110] The term “or combinations thereof” as used herein refers to all permutations and combinations of the listed items preceding the term. For example, “A, B, C, or combinations thereof” is intended to include at least one of: A, B, C, AB, AC, BC, or ABC, and if order is important in a particular context, also BA, CA, CB, CBA, BCA, ACB, BAC, or CAB. Continuing with this example, expressly included are combinations that contain repeats of one or more item or term, such as BB, AAA, AB, BBC, AAABCCCC, CBBAAA, CABABB, and so forth. The skilled artisan will understand that typically there is no limit on the number of items or terms in any combination, unless otherwise apparent from the context.

[0111] As used herein, words of approximation such as, without limitation, “about”, “substantial” or “substantially” refers to a condition that when so modified is understood to not necessarily be absolute or perfect but would be considered close enough to those of ordinary skill in the art to warrant designating the condition as being present. The extent to which the description may vary will depend on how great a change can be instituted and still have one of ordinary skilled in the art recognize the modified feature as still having the required characteristics and capabilities of the unmodified feature. In general, but subject to the preceding discussion, a numerical value herein that is modified by a word of approximation such as “about” may vary from the stated value by at least ±1, 2, 3, 4, 5, 6, 7, 10, 12 or 15%. Additionally, the section headings herein are provided for consistency with the suggestions under 37 CFR 1.77 or otherwise to provide organizational cues. These headings shall not limit or characterize the invention(s) set out in any claims that may issue from this disclosure. Specifically and by way of example, although the headings refer to a “Field of Invention,” such claims should not be limited by the language under this heading to describe the so-called technical field. Further, a description of technology in the “Background of the Invention” section is not to be construed as an admission that technology is prior art to any invention(s) in this disclosure. Neither is the “Summary” to be considered a characterization of the invention(s) set forth in issued claims. Furthermore, any reference in this disclosure to “invention” in the singular should not be used to argue that there is only a single point of novelty in this disclosure. Multiple inventions may be set forth according to the limitations of the multiple claims issuing from this disclosure, and such claims accordingly define the invention(s), and their equivalents, that are protected thereby. In all instances, the scope of such claims shall be considered on their own merits in light of this disclosure, but should not be constrained by the headings set forth herein.

[0112] For each of the claims, each dependent claim can depend both from the independent claim and from each of the prior dependent claims for each and every claim so long as the prior claim provides a proper antecedent basis for a claim term or element.

[0113] To aid the Patent Office, and any readers of any patent issued on this application in interpreting the claims appended hereto, applicants wish to note that they do not intend any of the appended claims to invoke paragraph 6 of 35 U.S.C. § 112, U.S.C. § 112 paragraph (f), or equivalent, as it exists on the date of filing hereof unless the words “means for” or “step for” are explicitly used in the particular claim.

[0114] All of the compositions and/or methods disclosed and claimed herein can be made and executed without undue experimentation in light of the present disclosure. While the compositions and methods of this invention have been described in terms of preferred embodiments, it will be apparent to those of skill in the art that variations may be applied to the compositions and/or methods and in the steps or in the sequence of steps of the method described herein without departing from the concept, spirit and scope of the invention. All such similar substitutes and modifications apparent to those skilled in the art are deemed to be within the spirit, scope and concept of the invention as defined by the appended claims.

LENGTHY TABLES
The patent application contains a lengthy table section. A copy of the table is available in electronic form from the USPTO web site (https://seqdata.uspto.gov/?pageRequest=docDetail&DocID=US20240327515A1). An electronic copy of the table will also be available from the USPTO upon request and payment of the fee set forth in 37 CFR 1.19(b)(3).

What is claimed is:

1. An anti-CD3 antibody, wherein the antibody comprises:
a. a heavy chain variable domain (VH) complementarity determining region 1 (CDR1) comprising the amino acid sequence of any one of the following SEQ ID NOs: 1, 11, 21, 31, 41, 51, 61, 71, 81, 91, 101, 111, 121, 131, 141, 151, 161, 171, 181, 191, 201, 211, 221, 231, 241, 251, 261, 271, 281, 291, 301, 311, 321, 331, 341, 351, 361, 371, 381, 391, 401, 411, 421, 431, 441, 451, 461, 471, 481, 491, 501, 511, 521, 531, 541, 551, 561, 571, 581, 591, 601, 611, 621, 631, 641, 651, 661, 671, 681, 691, 701, 711, 721, 731, 741, 751, 761, 771, 781, 791, 801, 811, 821, 831, 841, 851, 861, 871, 881, 891, 901, 911, 921, 931, 941, 951, 961, 971, 981, 991, 1001, 1011, 1021, 1031, 1041, 1051, 1061, 1071, 1081, 1091, 1101, 1111, 1121, 1131, 1141, 1151, 1161, 1171, 1181, 1191, 1201, 1211, 1221, 1231, 1241, 1251, 1261, 1271, 1281, 1291, 1301, 1311, 1321, 1331, 1341, 1351, 1361, 1371, 1381, 1391, 1401, 1411, 1421, 1431, 1441, 1451, 1461, 1471, 1481, 1491, 1501, 1511, 1521, 1531, 1541, 1551, 1561, 1571, 1581, 1591, 1601, 1611, 1621, 1631, 1641, 1651, 1661, 1671, 1681, 1691, 1701, 1711, 1721, 1731, 1741, 1751, 1761, 1771, 1781, 1791, 1801, 1811, 1821, 1831, 1841, 1851, 1861, 1871, 1881, 1891, 1901, 1911, 1916, 1921, 1926, 1931, 1936, 1941, 1946, 1951, 1956, 1961, 1966, 1971, 1976, 1981, 1986, 1991, 1996, 2001, 2006, 2011, 2016, 2021, 2026, 2031, 2036, 2041, 2046, 2051, 2056, 2061, 2066, 2071, 2076, 2081, 2086, 2091, 2096, 2101, 2106, 2111, 2116, 2121, 2126, 2131, 2136, 2141, 2146, 2151, 2156, 2161, 2166, 2171, 2176, 2181, or 2186; and
b. a VH CDR2 comprising the amino acid sequence of any one of the following SEQ ID NOs: 2, 12, 22, 32, 42, 52, 62, 72, 82, 92, 102, 112, 122, 132, 142, 152, 162, 172, 182, 192, 202, 212, 222, 232, 242, 252, 262, 272, 282, 292, 302, 312, 322, 332, 342, 352, 362, 372, 382, 392, 402, 412, 422, 432, 442, 452, 462, 472, 482, 492, 502, 512, 522, 532, 542, 552, 562, 572, 582, 592, 602, 612, 622, 632, 642, 652, 662, 672, 682, 692, 702, 712, 722, 732, 742, 752, 762, 772, 782, 792, 802, 812, 822, 832, 842, 852, 862, 872, 882, 892, 902, 912, 922, 932, 942, 952, 962, 972, 982, 992, 1002, 1012, 1022, 1032, 1042, 1052, 1062, 1072, 1082, 1092, 1102, 1112, 1122, 1132, 1142, 1152, 1162, 1172, 1182, 1192, 1202, 1212, 1222, 1232, 1242, 1252, 1262, 1272, 1282, 1292, 1302, 1312, 1322, 1332, 1342, 1352, 1362, 1372, 1382, 1392, 1402, 1412, 1422, 1432, 1442, 1452, 1462, 1472, 1482, 1492, 1502, 1512, 1522, 1532, 1542, 1552, 1562, 1572, 1582, 1592, 1602, 1612, 1622, 1632, 1642, 1652, 1662, 1672, 1682, 1692, 1702, 1712, 1722, 1732, 1742, 1752, 1762, 1772, 1782, 1792, 1802, 1812, 1822, 1832, 1842, 1852, 1862, 1872, 1882, 1892, 1902, 1912, 1917, 1922, 1927, 1932, 1937, 1942, 1947, 1952, 1957, 1962, 1967, 1972, 1977, 1982, 1987, 1992, 1997, 2002, 2007, 2012, 2017, 2022, 2027, 2032, 2037, 2042, 2047, 2052, 2057, 2062, 2067, 2072, 2077, 2082, 2087, 2092, 2097, 2102, 2107, 2112, 2117, 2122, 2127, 2132, 2137, 2142, 2147, 2152, 2157, 2162, 2167, 2172, 2177, 2182, or 2187; and
c. a VH CDR3 comprising the amino acid sequence of any one of the following SEQ ID NOs: 3, 13, 23, 33, 43, 53, 63, 73, 83, 93, 103, 113, 123, 133, 143, 153, 163, 173, 183, 193, 203, 213, 223, 233, 243, 253, 263, 273, 283, 293, 303, 313, 323, 333, 343, 353, 363, 373, 383, 393, 403, 413, 423, 433, 443, 453, 463, 473, 483, 493, 503, 513, 523, 533, 543, 553, 563, 573, 583, 593, 603, 613, 623, 633, 643, 653, 663, 673, 683, 693, 703, 713, 723, 733, 743, 753, 763, 773, 783, 793, 803, 813, 823, 833, 843, 853, 863, 873, 883, 893, 903, 913, 923, 933, 943, 953, 963, 973, 983, 993, 1003, 1013, 1023, 1033, 1043, 1053, 1063, 1073, 1083, 1093, 1103, 1113, 1123, 1133, 1143, 1153, 1163, 1173, 1183, 1193, 1203, 1213, 1223, 1233, 1243, 1253, 1263, 1273, 1283, 1293, 1303, 1313, 1323, 1333, 1343, 1353, 1363, 1373, 1383, 1393, 1403, 1413, 1423, 1433, 1443, 1453, 1463, 1473, 1483, 1493, 1503, 1513, 1523, 1533, 1543, 1553, 1563, 1573, 1583, 1593, 1603, 1613, 1623, 1633, 1643, 1653, 1663, 1673, 1683, 1693, 1703, 1713, 1723, 1733, 1743, 1753, 1763, 1773, 1783, 1793, 1803, 1813, 1823, 1833, 1843, 1853, 1863, 1873, 1883, 1893, 1903, 1913, 1918, 1923, 1928, 1933, 1938, 1943, 1948, 1953, 1958, 1963, 1968, 1973, 1978, 1983, 1988, 1993, 1998, 2003, 2008, 2013, 2018, 2023, 2028, 2033, 2038, 2043, 2048, 2053, 2058, 2063, 2068, 2073, 2078, 2083, 2088, 2093, 2098, 2103, 2108, 2113, 2118, 2123, 2128, 2133, 2138, 2143, 2148, 2153, 2158, 2163, 2168, 2173, 2178, 2183, or 2188; and
d. a light chain variable domain (VL) CDR1 comprising the amino acid sequence of any one of the following SEQ ID NOs: 6, 16, 26, 36, 46, 56, 66, 76, 86, 96, 106, 116, 126, 136, 146, 156, 166, 176, 186, 196, 206, 216, 226, 236, 246, 256, 266, 276, 286, 296, 306, 316, 326, 336, 346, 356, 366, 376, 386, 396, 406, 416, 426, 436, 446, 456, 466, 476, 486, 496, 506, 516, 526, 536, 546, 556, 566, 576, 586, 596, 606, 616, 626, 636, 646, 656, 666, 676, 686, 696, 706, 716, 726, 736, 746, 756, 766, 776, 786, 796, 806, 816, 826, 836, 846, 856, 866, 876, 886, 896, 906, 916, 926, 936, 946, 956, 966, 976, 986, 996, 1006, 1016, 1026, 1036, 1046, 1056, 1066, 1076, 1086, 1096, 1106, 1116, 1126, 1136, 1146, 1156, 1166, 1176, 1186, 1196, 1206, 1216, 1226, 1236, 1246, 1256, 1266, 1276, 1286, 1296, 1306, 1316, 1326, 1336, 1346, 1356, 1366, 1376, 1386, 1396, 1406, 1416, 1426, 1436, 1446, 1456, 1466, 1476, 1486, 1496, 1506, 1516, 1526, 1536, 1546, 1556, 1566, 1576, 1586, 1596, 1606, 1616, 1626, 1636, 1646, 1656, 1666, 1676, 1686, 1696, 1706, 1716, 1726, 1736, 1746, 1756, 1766, 1776, 1786, 1796, 1806, 1816, 1826, 1836, 1846, 1856, 1866, 1876, 1886, 1896, 1906, 2161, 2166, 2171, 2176, 2181, 2186, 2191, 2196, 2201, 2206, 2211, 2216, 2221, 2226, 2231, 2236, 2241, 2246, 2251, 2256, 2261, 2266, 2271, 2276, 2281, 2286, 2291, 2296, 2301, 2306, 2311, 2316, 2321, 2326, 2331, or 2336; and
e. a VL CDR2 comprising the amino acid sequence of any one of the following SEQ ID NOs: 7, 17, 27, 37, 47, 57, 67, 77, 87, 97, 107, 117, 127, 137, 147, 157, 167, 177, 187, 197, 207, 217, 227, 237, 247, 257, 267, 277, 287, 297, 307, 317, 327, 337, 347, 357, 367, 377, 387, 397, 407, 417, 427, 437, 447, 457, 467, 477, 487, 497, 507, 517, 527, 537, 547, 557, 567, 577, 587, 597, 607, 617, 627, 637, 647, 657, 667, 677, 687, 697, 707, 717, 727, 737, 747, 757, 767, 777, 787, 797, 807, 817, 827, 837, 847, 857, 867, 877, 887, 897, 907, 917, 927, 937, 947, 957, 967, 977, 987, 997, 1007, 1017, 1027, 1037, 1047, 1057, 1067, 1077, 1087, 1097, 1107, 1117, 1127, 1137, 1147, 1157, 1167, 1177, 1187, 1197, 1207, 1217, 1227, 1237, 1247, 1257, 1267, 1277, 1287, 1297, 1307, 1317, 1327, 1337, 1347, 1357, 1367, 1377, 1387, 1397, 1407, 1417, 1427, 1437, 1447, 1457, 1467, 1477, 1487, 1497, 1507, 1517, 1527, 1537, 1547, 1557, 1567, 1577, 1587, 1597, 1607, 1617, 1627, 1637, 1647, 1657, 1667, 1677, 1687, 1697, 1707, 1717, 1727, 1737, 1747, 1757, 1767, 1777, 1787, 1797, 1807, 1817, 1827, 1837, 1847, 1857, 1867, 1877, 1887, 1897, 1907, 2162, 2167, 2172, 2177, 2182, 2187, 2192, 2197, 2202, 2207, 2212, 2217, 2222, 2227, 2232, 2237, 2242, 2247, 2252, 2257, 2262, 2267, 2272, 2277, 2282, 2287, 2292, 2297, 2302, 2307, 2312, 2317, 2322, 2327, 2332, or 2337; and
f. a VL CDR3 comprising the amino acid sequence of any one of the following SEQ ID NOs: 8, 18, 28, 38, 48, 58, 68, 78, 88, 98, 108, 118, 128, 138, 148, 158, 168, 178, 188, 198, 208, 218, 228, 238, 248, 258, 268, 278, 288, 298, 308, 318, 328, 338, 348, 358, 368, 378, 388, 398, 408, 418, 428, 438, 448, 458, 468, 478, 488, 498, 508, 518, 528, 538, 548, 558, 568, 578, 588, 598, 608, 618, 628, 638, 648, 658, 668, 678, 688, 698, 708, 718, 728, 738, 748, 758, 768, 778, 788, 798, 808, 818, 828, 838, 848, 858, 868, 878, 888, 898, 908, 918, 928, 938, 948, 958, 968, 978, 988, 998, 1008, 1018, 1028, 1038, 1048, 1058, 1068, 1078, 1088, 1098, 1108, 1118, 1128, 1138, 1148, 1158, 1168, 1178, 1188, 1198, 1208, 1218, 1228, 1238, 1248, 1258, 1268, 1278, 1288, 1298, 1308, 1318, 1328, 1338, 1348, 1358, 1368, 1378, 1388, 1398, 1408, 1418, 1428, 1438, 1448, 1458, 1468, 1478, 1488, 1498, 1508, 1518, 1528, 1538, 1548, 1558, 1568, 1578, 1588, 1598, 1608, 1618, 1628, 1638, 1648, 1658, 1668, 1678, 1688, 1698, 1708, 1718, 1728, 1738, 1748, 1758, 1768, 1778, 1788, 1798, 1808, 1818, 1828, 1838, 1848, 1858, 1868, 1878, 1888, 1898, 1908, 2163, 2168, 2173, 2178, 2183, 2188, 2193, 2198, 2203, 2208, 2213, 2218, 2223, 2228, 2233, 2238, 2243, 2248, 2253, 2258, 2263, 2268, 2273, 2278, 2283, 2288, 2293, 2298, 2303, 2308, 2313, 2318, 2323, 2328, 2333, or 2338.

2. The antibody of claim 1, wherein the antibody comprises:
a. a heavy chain comprising the amino acid sequence of any one of the following SEQ ID NOs: 4, 14, 24, 34, 44, 54, 64, 74, 84, 94, 104, 114, 124, 134, 144, 154, 164, 174, 184, 194, 204, 214, 224, 234, 244, 254, 264, 274, 284, 294, 304, 314, 324, 334, 344, 354, 364, 374, 384, 394, 404, 414, 424, 434, 444, 454, 464, 474, 484, 494, 504, 514, 524, 534, 544, 554, 564, 574, 584, 594, 604, 614, 624, 634, 644, 654, 664, 674, 684, 694, 704, 714, 724, 734, 744, 754, 764, 774, 784, 794, 804, 814, 824, 834, 844, 854, 864, 874, 884, 894, 904, 914, 924, 934, 944, 954, 964, 974, 984, 994, 1004, 1014, 1024, 1034, 1044, 1054, 1064, 1074, 1084, 1094, 1104, 1114, 1124, 1134, 1144, 1154, 1164, 1174, 1184, 1194, 1204, 1214, 1224, 1234, 1244, 1254, 1264, 1274, 1284, 1294, 1304, 1314, 1324, 1334, 1344, 1354, 1364, 1374, 1384, 1394, 1404, 1414, 1424, 1434, 1444, 1454, 1464, 1474, 1484, 1494, 1504, 1514, 1524, 1534, 1544, 1554, 1564, 1574, 1584, 1594, 1604, 1614, 1624, 1634, 1644, 1654, 1664, 1674, 1684, 1694, 1704, 1714, 1724, 1734, 1744, 1754, 1764, 1774, 1784, 1794, 1804, 1814, 1824, 1834, 1844, 1854, 1864, 1874, 1884, 1894, 1904, 1914, 1919, 1924, 1929, 1934, 1939, 1944, 1949, 1954, 1959, 1964, 1969, 1974, 1979, 1984, 1989, 1994, 1999, 2004, 2009, 2014, 2019, 2024, 2029, 2034, 2039, 2044, 2049, 2054, 2059, 2064, 2069, 2074, 2079, 2084, 2089, 2094, 2099, 2104, 2109, 2114, 2119, 2124, 2129, 2134, 2139, 2144, 2149, 2154, 2159, 2164, 2169, 2174, 2179, 2184, or 2189, and
b. a light chain comprising the amino acid sequence of any one of the following SEQ ID NOs: 9, 19, 29, 39, 49, 59, 69, 79, 89, 99, 109, 119, 129, 139, 149, 159, 169, 179, 189, 199, 209, 219, 229, 239, 249, 259, 269, 279, 289, 299, 309, 319, 329, 339, 349, 359, 369, 379, 389, 399, 409, 419, 429, 439, 449, 459, 469, 479, 489, 499, 509, 519, 529, 539, 549, 559, 569, 579, 589, 599, 609, 619, 629, 639, 649, 659, 669, 679, 689, 699, 709, 719, 729, 739, 749, 759, 769, 779, 789, 799, 809, 819, 829, 839, 849, 859, 869, 879, 889, 899, 909, 919, 929, 939, 949, 959, 969, 979, 989, 999, 1009, 1019, 1029, 1039, 1049, 1059, 1069, 1079, 1089, 1099, 1109, 1119, 1129, 1139, 1149, 1159, 1169, 1179, 1189, 1199, 1209, 1219, 1229, 1239, 1249, 1259, 1269, 1279, 1289, 1299, 1309, 1319, 1329, 1339, 1349, 1359, 1369, 1379, 1389, 1399, 1409, 1419, 1429, 1439, 1449, 1459, 1469, 1479, 1489, 1499, 1509, 1519, 1529, 1539, 1549, 1559, 1569, 1579, 1589, 1599, 1609, 1619, 1629, 1639, 1649, 1659, 1669, 1679, 1689, 1699, 1709, 1719, 1729, 1739, 1749, 1759, 1769, 1779, 1789, 1799, 1809, 1819, 1829, 1839, 1849, 1859, 1869, 1879, 1889, 1899, 1909, 2164, 2169, 2174, 2179, 2184, 2189, 2194, 2199, 2204, 2209, 2214, 2219, 2224, 2229, 2234, 2239, 2244, 2249, 2254, 2259, 2264, 2269, 2274, 2279, 2284, 2289, 2294, 2299, 2304, 2309, 2314, 2319, 2324, 2329, 2334, or 2339.

3. The antibody of claim 1, wherein the antibody is encoded by a nucleic acid that comprises:
a. a VH comprising the nucleic acid sequence of any one of the following SEQ ID NOs: 5, 15, 25, 35, 45, 55, 65, 75, 85, 95, 105, 115, 125, 135, 145, 155, 165, 175, 185, 195, 205, 215, 225, 235, 245, 255, 265, 275, 285, 295, 305, 315, 325, 335, 345, 355, 365, 375, 385, 395, 405, 415, 425, 435, 445, 455, 465, 475, 485, 495, 505, 515, 525, 535, 545, 555, 565, 575, 585, 595, 605, 615, 625, 635, 645, 655, 665, 675, 685, 695, 705, 715, 725, 735, 745, 755, 765, 775, 785, 795, 805, 815, 825, 835, 845, 855, 865, 875, 885, 895, 905, 915, 925, 935, 945, 955, 965, 975, 985, 995, 1005, 1015, 1025, 1035, 1045, 1055, 1065, 1075, 1085, 1095, 1105, 1115, 1125, 1135, 1145, 1155, 1165, 1175, 1185, 1195, 1205, 1215, 1225, 1235, 1245, 1255, 1265, 1275, 1285, 1295, 1305, 1315, 1325, 1335, 1345, 1355, 1365, 1375, 1385, 1395, 1405, 1415, 1425, 1435, 1445, 1455, 1465, 1475, 1485, 1495, 1505, 1515, 1525, 1535, 1545, 1555, 1565, 1575, 1585, 1595, 1605, 1615, 1625, 1635, 1645, 1655, 1665, 1675, 1685, 1695, 1705, 1715, 1725, 1735, 1745, 1755, 1765, 1775, 1785, 1795, 1805, 1815, 1825, 1835, 1845, 1855, 1865, 1875, 1885, 1895, 1905, 1915, 1920, 1925, 1930, 1935, 1940, 1945, 1950, 1955, 1960, 1965, 1970, 1975, 1980, 1985, 1990, 1995, 2000, 2005, 2010, 2015, 2020, 2025, 2030, 2035, 2040, 2045, 2050, 2055, 2060, 2065, 2070, 2075, 2080, 2085, 2090, 2095, 2100, 2105, 2110, 2115, 2120, 2125, 2130, 2135, 2140, 2145, 2150, 2155, 2160, 2165, 2170, 2175, 2180, 2185, or 2190, and
b. a VL comprising the nucleic acid sequence of any one of the following SEQ ID NOs: 10, 20, 30, 40, 50, 60, 70, 80, 90, 100, 110, 120, 130, 140, 150, 160, 170, 180, 190, 200, 210, 220, 230, 240, 250, 260, 270, 280, 290, 300, 310, 320, 330, 340, 350, 360, 370, 380, 390, 400, 410, 420, 430, 440, 450, 460, 470, 480, 490, 500, 510, 520, 530, 540, 550, 560, 570, 580, 590, 600, 610, 620, 630, 640, 650, 660, 670, 680, 690, 700, 710, 720, 730, 740, 750, 760, 770, 780, 790, 800, 810, 820, 830, 840, 850, 860, 870, 880, 890, 900, 910, 920, 930, 940, 950, 960, 970, 980, 990, 1000, 1010, 1020, 1030, 1040, 1050, 1060, 1070, 1080, 1090, 1100, 1110, 1120, 1130, 1140, 1150, 1160, 1170, 1180, 1190, 1200, 1210, 1220, 1230, 1240, 1250, 1260, 1270, 1280, 1290, 1300, 1310, 1320, 1330, 1340, 1350, 1360, 1370, 1380, 1390, 1400, 1410, 1420, 1430, 1440, 1450, 1460, 1470, 1480, 1490, 1500, 1510, 1520, 1530, 1540, 1550, 1560, 1570, 1580, 1590, 1600, 1610, 1620, 1630, 1640, 1650, 1660, 1670, 1680, 1690, 1700, 1710, 1720, 1730, 1740, 1750, 1760, 1770, 1780, 1790, 1800, 1810, 1820, 1830, 1840, 1850, 1860, 1870, 1880, 1890, 1900, 1910, 2165, 2170, 2175, 2180, 2185, 2190, 2195, 2200, 2205, 2210, 2215, 2220, 2225, 2230, 2235, 2240, 2245, 2250, 2255, 2260, 2265, 2270, 2275, 2280, 2285, 2290, 2295, 2300, 2305, 2310, 2315, 2320, 2325, 2330, 2335, or 2340.

4. The antibody of claim 1, wherein the antibody comprises:
a heavy chain variable domain (VH) comprising complementarity determining regions CDR1 to CDR3, comprising the amino acid sequence triplets: 1, 2, 3; 11, 12, 13; 21, 22, 23; 31, 32, 33; 41, 42, 43; 51, 52, 53; 61, 62, 63; 71, 72, 73; 81, 82, 83; 91, 92, 93; 101, 102, 103; 111, 112, 113; 121, 122, 123; 131, 132, 133; 141, 142, 143; 151, 152, 153; 161, 162, 163; 171, 172, 173; 181, 182, 183; 191, 192, 193; 201, 202, 203; 211, 212, 213; 221, 222, 223; 231, 232, 233; 241, 242, 243; 251, 252, 253; 261, 262, 263; 271, 272, 273; 281, 282, 283; 291, 292, 293; 301, 302, 303; 311, 312, 313; 321, 322, 323; 331, 332, 333; 341, 342, 343; 351, 352, 353; 361, 362, 363; 371, 372, 373; 381, 382, 383; 391, 392, 393; 401, 402, 403; 411, 412, 413; 421, 422, 423; 431, 432, 433; 441, 442, 443; 451, 452, 453; 461, 462, 463; 471, 472, 473; 481, 482, 483; 491, 492, 493; 501, 502, 503; 511, 512, 513; 521, 522, 523; 531, 532, 533; 541, 542, 543; 551, 552, 553; 561, 562, 563; 571, 572, 573; 581, 582, 583; 591, 592, 593; 601, 602, 603; 611, 612, 613; 621, 622, 623; 631, 632, 633; 641, 642, 643; 651, 652, 653; 661, 662, 663; 671, 672, 673; 681, 682, 683; 691, 692, 693; 701, 702, 703; 711, 712, 713; 721, 722, 723; 731, 732, 733; 741, 742, 743; 751, 752, 753; 761, 762, 763; 771, 772, 773; 781, 782, 783; 791, 792, 793; 801, 802, 803; 811, 812, 813; 821, 822, 823; 831, 832, 833; 841, 842, 843; 851, 852, 853; 861, 862, 863; 871, 872, 873; 881, 882, 883; 891, 892, 893; 901, 902, 903; 911, 912, 913; 921, 922, 923; 931, 932, 933; 941, 942, 943; 951, 952, 953; 961, 962, 963; 971, 972, 973; 981, 982, 983; 991, 992, 993; 1001, 1002, 1003; 1011, 1012, 1013; 1021, 1022, 1023; 1031, 1032, 1033; 1041, 1042, 1043; 1051, 1052, 1053; 1061, 1062, 1063; 1071, 1072, 1073; 1081, 1082, 1083; 1091, 1092, 1093; 1101, 1102, 1103; 1111, 1112, 1113; 1121, 1122, 1123; 1131, 1132, 1133; 1141, 1142, 1143; 1151, 1152, 1153; 1161, 1162, 1163; 1171, 1172, 1173; 1181, 1182, 1183; 1191, 1192, 1193; 1201, 1202, 1203; 1211, 1212, 1213; 1221, 1222, 1223; 1231, 1232, 1233; 1241, 1242, 1243; 1251, 1252, 1253; 1261, 1262, 1263; 1271, 1272, 1273; 1281, 1282, 1283; 1291, 1292, 1293; 1301, 1302, 1303; 1311, 1312, 1313; 1321, 1322, 1323; 1331, 1332, 1333; 1341, 1342, 1343; 1351, 1352, 1353; 1361, 1362, 1363; 1371, 1372, 1373; 1381, 1382, 1383; 1391, 1392, 1393; 1401, 1402, 1403; 1411, 1412, 1413; 1421, 1422, 1423; 1431, 1432, 1433; 1441, 1442, 1443; 1451, 1452, 1453; 1461, 1462, 1463; 1471, 1472, 1473; 1481, 1482, 1483; 1491, 1492, 1493; 1501, 1502, 1503; 1511, 1512, 1513; 1521, 1522, 1523; 1531, 1532, 1533; 1541, 1542, 1543; 1551, 1552, 1553; 1561, 1562, 1563; 1571, 1572, 1573; 1581, 1582, 1583; 1591, 1592, 1593; 1601, 1602, 1603; 1611, 1612, 1613; 1621, 1622, 1623; 1631, 1632, 1633; 1641, 1642, 1643; 1651, 1652, 1653; 1661, 1662, 1663; 1671, 1672, 1673; 1681, 1682, 1683; 1691, 1692, 1693; 1701, 1702, 1703; 1711, 1712, 1713; 1721, 1722, 1723; 1731, 1732, 1733; 1741, 1742, 1743; 1751, 1752, 1753; 1761, 1762, 1763; 1771, 1772, 1773; 1781, 1782, 1783; 1791, 1792, 1793; 1801, 1802, 1803; 1811, 1812, 1813; 1821, 1822, 1823; 1831, 1832, 1833; 1841, 1842, 1843; 1851, 1852, 1853; 1861, 1862, 1863; 1871, 1872, 1873; 1881, 1882, 1883; 1891, 1892, 1893; 1901, 1902, 1903; 1911, 1912, 1913; 1921, 1922, 1923; or 1931, 1932, 1933; and
a light chain variable domain (VL) comprising complementarity determining regions CDR1 to CDR3, comprising the amino acid sequence triplets: 6, 7, 8; 16, 17, 18; 26, 27, 28; 36, 37, 38; 46, 47, 48; 56, 57, 58; 66, 67, 68; 76, 77, 78; 86, 87, 88; 96, 97, 98; 106, 107, 108; 116, 117, 118; 126, 127, 128; 136, 137, 138; 146, 147, 148; 156, 157, 158; 166, 167, 168; 176, 177, 178; 186, 187, 188; 196, 197, 198; 206, 207, 208; 216, 217, 218; 226, 227, 228; 236, 237, 238; 246, 247, 248; 256, 257, 258; 266, 267, 268; 276, 277, 278; 286, 287, 288; 296, 297, 298; 306, 307, 308; 316, 317, 318; 326, 327, 328; 336, 337, 338; 346, 347, 348; 356, 357, 358; 366, 367, 368; 376, 377, 378; 386, 387, 388; 396, 397, 398; 406, 407, 408; 416, 417, 418; 426, 427, 428; 436, 437, 438; 446, 447, 448; 456, 457, 458; 466, 467, 468; 476, 477, 478; 486, 487, 488; 496, 497, 498; 506, 507, 508; 516, 517, 518; 526, 527, 528; 536, 537, 538; 546, 547, 548; 556, 557, 558; 566, 567, 568; 576, 577, 578; 586, 587, 588; 596, 597, 598; 606, 607, 608; 616, 617, 618; 626, 627, 628; 636, 637, 638; 646, 647, 648; 656, 657, 658; 666, 667, 668; 676, 677, 678; 686, 687, 688; 696, 697, 698; 706, 707, 708; 716, 717, 718; 726, 727, 728; 736, 737, 738; 746, 747, 748; 756, 757, 758; 766, 767, 768; 776, 777, 778; 786, 787, 788; 796, 797, 798; 806, 807, 808; 816, 817, 818; 826, 827, 828; 836, 837, 838; 846, 847, 848; 856, 857, 858; 866, 867, 868; 876, 877, 878; 886, 887, 888; 896, 897, 898; 906, 907, 908; 916, 917, 918; 926, 927, 928; 936, 937, 938; 946, 947, 948; 956, 957, 958; 966, 967, 968; 976, 977, 978; 986, 987, 988; 996, 997, 998; 1006, 1007, 1008; 1016, 1017, 1018; 1026, 1027, 1028; 1036, 1037, 1038; 1046, 1047, 1048; 1056, 1057, 1058; 1066, 1067, 1068; 1076, 1077, 1078; 1086, 1087, 1088; 1096, 1097, 1098; 1106, 1107, 1108; 1116, 1117, 1118; 1126, 1127, 1128; 1136, 1137, 1138; 1146, 1147, 1148; 1156, 1157, 1158; 1166, 1167, 1168; 1176, 1177, 1178; 1186, 1187, 1188; 1196, 1197, 1198; 1206, 1207, 1208; 1216, 1217, 1218; 1226, 1227, 1228; 1236, 1237, 1238; 1246, 1247, 1248; 1256, 1257, 1258; 1266, 1267, 1268; 1276, 1277, 1278; 1286, 1287, 1288; 1296, 1297, 1298; 1306, 1307, 1308; 1316, 1317, 1318; 1326, 1327, 1328; 1336, 1337, 1338; 1346, 1347, 1348; 1356, 1357, 1358; 1366, 1367, 1368; 1376, 1377, 1378; 1386, 1387, 1388; 1396, 1397, 1398; 1406, 1407, 1408; 1416, 1417, 1418; 1426, 1427, 1428; 1436, 1437, 1438; 1446, 1447, 1448; 1456, 1457, 1458; 1466, 1467, 1468; 1476, 1477, 1478; 1486, 1487, 1488; 1496, 1497, 1498; 1506, 1507, 1508; 1516, 1517, 1518; 1526, 1527, 1528; 1536, 1537, 1538; 1546, 1547, 1548; 1556, 1557, 1558; 1566, 1567, 1568; 1576, 1577, 1578; 1586, 1587, 1588; 1596, 1597, 1598; 1606, 1607, 1608; 1616, 1617, 1618; 1626, 1627, 1628; 1636, 1637, 1638; 1646, 1647, 1648; 1656, 1657, 1658; 1666, 1667, 1668; 1676, 1677, 1678; 1686, 1687, 1688; 1696, 1697, 1698; 1706, 1707, 1708; 1716, 1717, 1718; 1726, 1727, 1728; 1736, 1737, 1738; 1746, 1747, 1748; 1756, 1757, 1758; 1766, 1767, 1768; 1776, 1777, 1778; 1786, 1787, 1788; 1796, 1797, 1798; 1806, 1807, 1808; 1816, 1817, 1818; 1826, 1827, 1828; 1836, 1837, 1838; 1846, 1847, 1848; 1856, 1857, 1858; 1866, 1867, 1868; 1876, 1877, 1878; 1886, 1887, 1888; 1896, 1897, 1898; 1906, 1907, 1908; 1916, 1917, 1918; 1926, 1927, 1928; or 1936, 1937, 1938.

5. The antibody of claim 1, wherein the antibody comprises:
a heavy chain variable domain (VH) comprising complementarity determining regions CDR1 to CDR3, comprising the amino acid sequence triplets: 1941, 1942, 1943; 1946, 1947, 1948; 1951, 1952, 1953; 1956, 1957, 1958; 1961, 1962, 1963; 1966, 1967, 1968; 1971, 1972, 1973; 1976, 1977, 1978; 1981, 1982, 1983; 1986, 1987, 1988; 1991, 1992, 1993; 1996, 1997, 1998; 2001, 2002, 2003; 2006, 2007, 2008; 2011, 2012, 2013; 2016, 2017, 2018; 2021, 2022, 2023; 2026, 2027, 2028; 2031, 2032, 2033; 2036, 2037, 2038; 2041, 2042, 2043; 2046, 2047, 2048; 2051, 2052, 2053; 2056, 2057, 2058; 2061, 2062, 2063; 2066, 2067, 2068; 2071, 2072, 2073; 2076, 2077, 2078; 2081, 2082, 2083; 2086, 2087, 2088; 2091, 2092, 2093; 2096, 2097, 2098; 2101, 2102, 2103; 2106, 2107, 2108; 2111, 2112, 2113; 2116, 2117, 2118; 2121, 2122, 2123; 2126, 2127, 2128; 2131, 2132, 2133; 2136, 2137, 2138; 2141, 2142, 2143; 2146, 2147, 2148; 2151, 2152, 2153; 2156, 2157, 2158; 2161, 2162, 2163; 2166, 2167, 2168; 2171, 2172, 2173; 2176, 2177, 2178; 2181, 2182, 2183; or 2186, 2187, 2188; and
a light chain variable domain (VL) comprising complementarity determining regions CDR1 to CDR3, comprising the amino acid sequence triplets: 2191, 2192, 2193; 2196, 2197, 2198; 2201, 2202, 2203; 2206, 2207, 2208; 2211, 2212, 2213; 2216, 2217, 2218; 2221, 2222, 2223; 2226, 2227, 2228; 2231, 2232, 2233; 2236, 2237, 2238; 2241, 2242, 2243; 2246, 2247, 2248; 2251, 2252, 2253; 2256, 2257, 2258; 2261, 2262, 2263; 2266, 2267, 2268; 2271, 2272, 2273; 2276, 2277, 2278; 2281, 2282, 2283; 2286, 2287, 2288; 2291, 2292, 2293; 2296, 2297, 2298; 2301, 2302, 2303; 2306, 2307, 2308; 2311, 2312, 2313; 2316, 2317, 2318; 2321, 2322, 2323; 2326, 2327, 2328; 2331, 2332, 2333; or 2336, 2337, 2338.

6. The antibody of claim 1, wherein the antibody is a monoclonal, bispecific, multivalent, multi-specific, diabody, chimeric, scFv antibody, or fragments thereof.

7. The antibody of claim 1, wherein the antibody is a full-length antibody.

8. The antibody of claim 1, wherein the antibody is an antibody fragment.

9. The antibody fragment of claim 8, wherein the antibody is fused to an Fc domain of any one of the following: human IgG1, human IgG2, human IgG3, and human IgG4.

10. The antibody fragment of claim 9, wherein the Fc domain is a wild-type, variant, or truncated Fc domain.

11. The antibody of claim 1, further comprising a peptide linker between a VH2 domain and the CH1 domain.

12. A method of treating a disease in a subject in need thereof, comprising administering to the subject a therapeutically effective amount of the antibody of claim 1.

13. The method of claim 12, wherein the disease is an autoimmune disease, an inflammatory disease, or a cancer.

14. The method of claim 12, wherein the subject is human.

15. A nucleic acid encoding an anti-CD3 antibody, wherein the nucleic acid comprises:
a VH comprising the nucleic acid sequence of any one of the following SEQ ID NOS: 5, 15, 25, 35, 45, 55, 65, 75, 85, 95, 105, 115, 125, 135, 145, 155, 165, 175, 185, 195, 205, 215, 225, 235, 245, 255, 265, 275, 285, 295, 305, 315, 325, 335, 345, 355, 365, 375, 385, 395, 405, 415, 425, 435, 445, 455, 465, 475, 485, 495, 505, 515, 525, 535, 545, 555, 565, 575, 585, 595, 605, 615, 625, 635, 645, 655, 665, 675, 685, 695, 705, 715, 725, 735, 745, 755, 765, 775, 785, 795, 805, 815, 825, 835, 845, 855, 865, 875, 885, 895, 905, 915, 925, 935, 945, 955, 965, 975, 985, 995, 1005, 1015, 1025, 1035, 1045, 1055, 1065, 1075, 1085, 1095, 1105, 1115, 1125, 1135, 1145, 1155, 1165, 1175, 1185, 1195, 1205, 1215, 1225, 1235, 1245, 1255, 1265, 1275, 1285, 1295, 1305, 1315, 1325, 1335, 1345, 1355, 1365, 1375, 1385, 1395, 1405, 1415, 1425, 1435, 1445, 1455, 1465, 1475, 1485, 1495, 1505, 1515, 1525, 1535, 1545, 1555, 1565, 1575, 1585, 1595, 1605, 1615, 1625, 1635, 1645, 1655, 1665, 1675, 1685, 1695, 1705, 1715, 1725, 1735, 1745, 1755, 1765, 1775, 1785, 1795, 1805, 1815, 1825, 1835, 1845, 1855, 1865, 1875, 1885, 1895, 1905, 1915, 1920, 1925, 1930, 1935, 1940, 1945, 1950, 1955, 1960, 1965, 1970, 1975, 1980, 1985, 1990, 1995, 2000, 2005, 2010, 2015, 2020, 2025, 2030, 2035, 2040, 2045, 2050, 2055, 2060, 2065, 2070, 2075, 2080, 2085, 2090, 2095, 2100, 2105, 2110, 2115, 2120, 2125, 2130, 2135, 2140, 2145, 2150, 2155, 2160, 2165, 2170, 2175, 2180, 2185, or 2190, and
a VL comprising the nucleic acid sequence of any one of the following SEQ ID NOS: 10, 20, 30, 40, 50, 60, 70, 80, 90, 100, 110, 120, 130, 140, 150, 160, 170, 180, 190, 200, 210, 220, 230, 240, 250, 260, 270, 280, 290, 300, 310, 320, 330, 340, 350, 360, 370, 380, 390, 400, 410, 420, 430, 440, 450, 460, 470, 480, 490, 500, 510, 520, 530, 540, 550, 560, 570, 580, 590, 600, 610, 620, 630, 640, 650, 660, 670, 680, 690, 700, 710, 720, 730, 740, 750, 760, 770, 780, 790, 800, 810, 820, 830, 840, 850, 860, 870, 880, 890, 900, 910, 920, 930, 940, 950, 960, 970, 980, 990, 1000, 1010, 1020, 1030, 1040, 1050, 1060, 1070, 1080, 1090, 1100, 1110, 1120, 1130, 1140, 1150, 1160, 1170, 1180, 1190, 1200, 1210, 1220, 1230, 1240, 1250, 1260, 1270, 1280, 1290, 1300, 1310, 1320, 1330, 1340, 1350, 1360, 1370, 1380, 1390, 1400, 1410, 1420, 1430, 1440, 1450, 1460, 1470, 1480, 1490, 1500, 1510, 1520, 1530, 1540, 1550, 1560, 1570, 1580, 1590, 1600, 1610, 1620, 1630, 1640, 1650, 1660, 1670, 1680, 1690, 1700, 1710, 1720, 1730, 1740, 1750, 1760, 1770, 1780, 1790, 1800, 1810, 1820, 1830, 1840, 1850, 1860, 1870, 1880, 1890, 1900, 1910, 2165, 2170, 2175, 2180, 2185, 2190, 2195, 2200, 2205, 2210, 2215, 2220, 2225, 2230, 2235, 2240, 2245, 2250, 2255, 2260, 2265, 2270, 2275, 2280, 2285, 2290, 2295, 2300, 2305, 2310, 2315, 2320, 2325, 2330, 2335, or 2340.

16. An expression vector comprising a nucleic acid encoding at least one of a nucleic acids encoding the antibody of claim 15.

17. A host cell comprising the vector of claim 16.

18. A method of making an anti-CD3 antibody comprising:
expressing in a cell a heavy chain variable domain (VH) comprising complementarity determining regions CDR1 to CDR3, comprising the amino acid sequence triplets: 1, 2, 3; 11, 12, 13; 21, 22, 23; 31, 32, 33; 41, 42, 43; 51, 52, 53; 61, 62, 63; 71, 72, 73; 81, 82, 83; 91, 92, 93; 101, 102, 103; 111, 112, 113; 121, 122, 123; 131, 132, 133; 141, 142, 143; 151, 152, 153; 161, 162, 163; 171, 172, 173; 181, 182, 183; 191, 192, 193; 201, 202, 203; 211, 212, 213; 221, 222, 223; 231, 232, 233; 241, 242, 243; 251, 252, 253; 261, 262, 263; 271, 272, 273; 281, 282, 283; 291, 292, 293; 301, 302, 303; 311, 312, 313; 321, 322, 323; 331, 332, 333; 341, 342, 343; 351, 352, 353; 361, 362, 363; 371, 372, 373; 381, 382, 383; 391, 392, 393; 401, 402, 403; 411, 412, 413; 421, 422, 423; 431, 432, 433; 441, 442, 443; 451, 452, 453; 461, 462, 463; 471, 472, 473; 481, 482, 483; 491, 492, 493; 501, 502, 503; 511, 512, 513; 521, 522, 523; 531, 532, 533; 541, 542, 543; 551, 552, 553; 561, 562, 563; 571, 572, 573; 581, 582, 583; 591, 592, 593; 601, 602, 603; 611, 612, 613; 621, 622, 623; 631, 632, 633; 641, 642, 643; 651, 652, 653; 661, 662, 663; 671, 672, 673; 681, 682, 683; 691, 692, 693; 701, 702, 703; 711, 712, 713; 721, 722, 723; 731, 732, 733; 741, 742, 743; 751, 752, 753; 761, 762, 763; 771, 772, 773; 781, 782, 783; 791, 792, 793; 801, 802, 803; 811, 812, 813; 821, 822, 823; 831, 832, 833; 841, 842, 843; 851, 852, 853; 861, 862, 863; 871, 872, 873; 881, 882, 883; 891, 892, 893; 901, 902, 903; 911, 912, 913; 921, 922, 923; 931, 932, 933; 941, 942, 943; 951, 952, 953; 961, 962, 963; 971, 972, 973; 981, 982, 983; 991, 992, 993; 1001, 1002, 1003; 1011, 1012, 1013; 1021, 1022, 1023; 1031, 1032, 1033; 1041, 1042, 1043; 1051, 1052, 1053; 1061, 1062, 1063; 1071, 1072, 1073; 1081, 1082, 1083; 1091, 1092, 1093; 1101, 1102, 1103; 1111, 1112, 1113; 1121, 1122, 1123; 1131, 1132, 1133; 1141, 1142, 1143; 1151, 1152, 1153; 1161, 1162, 1163; 1171, 1172, 1173; 1181, 1182, 1183; 1191, 1192, 1193; 1201, 1202, 1203; 1211, 1212, 1213; 1221, 1222, 1223; 1231, 1232, 1233; 1241, 1242, 1243; 1251, 1252, 1253; 1261, 1262, 1263; 1271, 1272, 1273; 1281, 1282, 1283; 1291, 1292, 1293; 1301, 1302, 1303; 1311, 1312, 1313; 1321, 1322, 1323; 1331, 1332, 1333; 1341, 1342, 1343; 1351, 1352, 1353; 1361, 1362, 1363; 1371, 1372, 1373; 1381, 1382, 1383; 1391, 1392, 1393; 1401, 1402, 1403; 1411, 1412, 1413; 1421, 1422, 1423; 1431, 1432, 1433; 1441, 1442, 1443; 1451, 1452, 1453; 1461, 1462, 1463; 1471, 1472, 1473; 1481, 1482, 1483; 1491, 1492, 1493; 1501, 1502, 1503; 1511, 1512, 1513; 1521, 1522, 1523; 1531, 1532, 1533; 1541, 1542, 1543; 1551, 1552, 1553; 1561, 1562, 1563; 1571, 1572, 1573; 1581, 1582, 1583; 1591, 1592, 1593; 1601, 1602, 1603; 1611, 1612, 1613; 1621, 1622, 1623; 1631, 1632, 1633; 1641, 1642, 1643; 1651, 1652, 1653; 1661, 1662, 1663; 1671, 1672, 1673; 1681, 1682, 1683; 1691, 1692, 1693; 1701, 1702, 1703; 1711, 1712, 1713; 1721, 1722, 1723; 1731, 1732, 1733; 1741, 1742, 1743; 1751, 1752, 1753; 1761, 1762, 1763; 1771, 1772, 1773; 1781, 1782, 1783; 1791, 1792, 1793; 1801, 1802, 1803; 1811, 1812, 1813; 1821, 1822, 1823; 1831, 1832, 1833; 1841, 1842, 1843; 1851, 1852, 1853; 1861, 1862, 1863; 1871, 1872, 1873; 1881, 1882, 1883; 1891, 1892, 1893; 1901, 1902, 1903; 1911, 1912, 1913; 1921, 1922, 1923; or 1931, 1932, 1933; and
a light chain variable domain (VL) comprising complementarity determining regions CDR1 to CDR3, comprising the amino acid sequence triplets: 6, 7, 8; 16, 17, 18; 26, 27, 28; 36, 37, 38; 46, 47, 48; 56, 57, 58; 66, 67, 68; 76, 77, 78; 86, 87, 88; 96, 97, 98; 106, 107, 108; 116, 117, 118; 126, 127, 128; 136, 137, 138; 146, 147, 148; 156, 157, 158; 166, 167, 168; 176, 177, 178; 186, 187, 188; 196, 197, 198; 206, 207, 208; 216, 217, 218; 226, 227, 228; 236, 237, 238; 246, 247, 248; 256, 257, 258; 266, 267, 268; 276, 277, 278; 286, 287, 288; 296, 297, 298; 306, 307, 308; 316, 317, 318; 326, 327, 328; 336, 337, 338; 346, 347, 348; 356, 357, 358; 366, 367, 368; 376, 377, 378; 386, 387, 388; 396, 397, 398; 406, 407, 408; 416, 417, 418; 426, 427, 428; 436, 437, 438; 446, 447, 448; 456, 457, 458; 466, 467, 468; 476, 477, 478; 486, 487, 488; 496, 497, 498; 506, 507, 508; 516, 517, 518; 526, 527, 528; 536, 537, 538; 546, 547, 548; 556, 557, 558; 566, 567, 568; 576, 577, 578; 586, 587, 588; 596, 597, 598; 606, 607, 608; 616, 617, 618; 626, 627, 628; 636, 637, 638; 646, 647, 648; 656, 657, 658; 666, 667, 668; 676, 677, 678; 686, 687, 688; 696, 697, 698; 706, 707, 708; 716, 717, 718; 726, 727, 728; 736, 737, 738; 746, 747, 748; 756, 757, 758; 766, 767, 768; 776, 777, 778; 786, 787, 788; 796, 797, 798; 806, 807, 808; 816, 817, 818; 826, 827, 828; 836, 837, 838; 846, 847, 848; 856, 857, 858; 866, 867, 868; 876, 877, 878; 886, 887, 888; 896, 897, 898; 906, 907, 908; 916, 917, 918; 926, 927, 928; 936, 937, 938; 946, 947, 948; 956, 957, 958; 966, 967, 968; 976, 977, 978; 986, 987, 988; 996, 997, 998; 1006, 1007, 1008; 1016, 1017, 1018; 1026, 1027, 1028; 1036, 1037, 1038; 1046, 1047, 1048; 1056, 1057, 1058; 1066, 1067, 1068; 1076, 1077, 1078; 1086, 1087, 1088; 1096, 1097, 1098; 1106, 1107, 1108; 1116, 1117, 1118; 1126, 1127, 1128; 1136, 1137, 1138; 1146, 1147, 1148; 1156, 1157, 1158; 1166, 1167, 1168; 1176, 1177, 1178; 1186, 1187, 1188; 1196, 1197, 1198; 1206, 1207, 1208; 1216, 1217, 1218; 1226, 1227, 1228; 1236, 1237, 1238; 1246, 1247, 1248; 1256, 1257, 1258; 1266, 1267, 1268; 1276, 1277, 1278; 1286, 1287, 1288; 1296, 1297, 1298; 1306, 1307, 1308; 1316, 1317, 1318; 1326, 1327, 1328; 1336, 1337, 1338; 1346, 1347, 1348; 1356, 1357, 1358; 1366, 1367, 1368; 1376, 1377, 1378; 1386, 1387, 1388; 1396, 1397, 1398; 1406, 1407, 1408; 1416, 1417, 1418; 1426, 1427, 1428; 1436, 1437, 1438; 1446, 1447, 1448; 1456, 1457, 1458; 1466, 1467, 1468; 1476, 1477, 1478; 1486, 1487, 1488; 1496, 1497, 1498; 1506, 1507, 1508; 1516, 1517, 1518; 1526, 1527, 1528; 1536, 1537, 1538; 1546, 1547, 1548; 1556, 1557, 1558; 1566, 1567, 1568; 1576, 1577, 1578; 1586, 1587, 1588; 1596, 1597, 1598; 1606, 1607, 1608; 1616, 1617, 1618; 1626, 1627, 1628; 1636, 1637, 1638; 1646, 1647, 1648; 1656, 1657, 1658; 1666, 1667, 1668; 1676, 1677, 1678; 1686, 1687, 1688; 1696, 1697, 1698; 1706, 1707, 1708; 1716, 1717, 1718; 1726, 1727, 1728; 1736, 1737, 1738; 1746, 1747, 1748; 1756, 1757, 1758; 1766, 1767, 1768; 1776, 1777, 1778; 1786, 1787, 1788; 1796, 1797, 1798; 1806, 1807, 1808; 1816, 1817, 1818; 1826, 1827, 1828; 1836, 1837, 1838; 1846, 1847, 1848; 1856, 1857, 1858; 1866, 1867, 1868; 1876, 1877, 1878; 1886, 1887, 1888; 1896, 1897, 1898; 1906, 1907, 1908; 1916, 1917, 1918; 1926, 1927, 1928; or 1936, 1937, 1938; or
a heavy chain variable domain (VH) comprising complementarity determining regions CDR1 to CDR3, comprising the amino acid sequence triplets: 1941, 1942, 1943; 1946, 1947, 1948; 1951, 1952, 1953; 1956, 1957, 1958; 1961, 1962, 1963; 1966, 1967, 1968; 1971, 1972, 1973; 1976, 1977, 1978; 1981, 1982, 1983; 1986, 1987, 1988; 1991, 1992, 1993; 1996, 1997, 1998; 2001, 2002, 2003; 2006, 2007, 2008; 2011, 2012, 2013; 2016, 2017, 2018; 2021, 2022, 2023; 2026, 2027, 2028; 2031, 2032, 2033; 2036, 2037, 2038; 2041, 2042, 2043; 2046, 2047, 2048; 2051, 2052, 2053; 2056, 2057, 2058; 2061, 2062, 2063; 2066, 2067, 2068; 2071, 2072, 2073; 2076, 2077, 2078; 2081, 2082, 2083; 2086, 2087, 2088; 2091, 2092, 2093; 2096, 2097, 2098; 2101, 2102, 2103; 2106, 2107, 2108; 2111, 2112, 2113; 2116, 2117, 2118; 2121, 2122, 2123; 2126, 2127, 2128; 2131, 2132, 2133; 2136, 2137, 2138; 2141, 2142, 2143; 2146, 2147, 2148; 2151, 2152, 2153; 2156, 2157, 2158; 2161, 2162, 2163; 2166, 2167, 2168; 2171, 2172, 2173; 2176, 2177, 2178; 2181, 2182, 2183; or 2186, 2187, 2188; and
a light chain variable domain (VL) comprising complementarity determining regions CDR1 to CDR3, comprising the amino acid sequence triplets: 2191, 2192, 2193; 2196, 2197, 2198; 2201, 2202, 2203; 2206, 2207, 2208; 2211, 2212, 2213; 2216, 2217, 2218; 2221, 2222, 2223; 2226, 2227, 2228; 2231, 2232, 2233; 2236, 2237, 2238; 2241, 2242, 2243; 2246, 2247, 2248; 2251, 2252, 2253; 2256, 2257, 2258; 2261, 2262, 2263; 2266, 2267, 2268; 2271, 2272, 2273; 2276, 2277, 2278; 2281, 2282, 2283; 2286, 2287, 2288; 2291, 2292, 2293; 2296, 2297, 2298; 2301, 2302, 2303; 2306, 2307, 2308; 2311, 2312, 2313; 2316, 2317, 2318; 2321, 2322, 2323; 2326, 2327, 2328; 2331, 2332, 2333; or 2336, 2337, 2338.

19. The method of claim 18, wherein the antibody is at least one of:
a monoclonal, bispecific, multivalent, multi-specific, diabody, chimeric, scFv antibody;
a fragment thereof;
a full-length antibody, is an antibody fragment,
an Fc domain of any one of the following: human IgG1, human IgG2, human IgG3,
and human IgG4; or
Fc domain is a wild-type, variant, or truncated Fc domain.

20. The method of claim 18, further comprising a peptide linker between a VH2 domain and the CH1 domain.

The application's sequence listing, which the Patent Office published only in electronic form, follows.

SEQUENCE LISTING (2351 sequences)

SEQ ID NO: 1 - protein, 10 aa, synthetic construct
  REGION 1..10: note = Synthetic
GVSLSSRDYS

SEQ ID NO: 2 - protein, 8 aa, synthetic construct
  REGION 1..8: note = Synthetic
FTPIFGTV

SEQ ID NO: 3 - protein, 11 aa, synthetic construct
  REGION 1..11: note = Synthetic
ARGGHWNPFDP

SEQ ID NO: 4 - protein, 120 aa, synthetic construct
  REGION 1..120: note = Synthetic
EVQLVQSGSELKKPGSSVKVSCKASGVSLSSRDYSISWVRQAPGQGLEWLGSFTPIFGTVTYAQKFQGRVTITADKSTSTAFMELTSLRSEDTAIYYCARGGHWNPFDPWGQGTLVTVSS

SEQ ID NO: 5 - DNA, 360 bp, synthetic construct
  misc_feature 1..360: note = Synthetic
  source 1..360: mol_type = other DNA
gaagttcaattagttcaatctggttctgaattaaaaaaacctggttcttctgttaaagtttcttgtaaagcttctggtgtttctttatcttctcgtgattattctatttcttgggttcgtcaagctcctggtcaaggtttagaatggttaggttcttttactcctatttttggtactgttacttatgctcaaaaatttcaaggtcgtgttactattactgctgataaatctacttctactgcttttatggaattaacttctttacgttctgaagatactgctatttattattgtgctcgtggtggtcattggaatccttttgatccttggggtcaaggtactttagttactgtttcttct

SEQ ID NO: 6 - protein, 6 aa, synthetic construct
  REGION 1..6: note = Synthetic
QSISSY

SEQ ID NO: 7 - skipped

SEQ ID NO: 8 - protein, 9 aa, synthetic construct
  REGION 1..9: note = Synthetic
QQSYSTPPT

SEQ ID NO: 9 - protein, 107 aa, synthetic construct
  REGION 1..107: note = Synthetic
DIQMTQSPSSLSASVGDRVTITCRASQSISSYLNWYQQKPGKAPKLLIYAASSLQSGVPSRFSGSGSGTDFTLTISSLQPEDFATYYCQQSYSTPPTFGQGTKVEIK

SEQ ID NO: 10 - DNA, 321 bp, synthetic construct
  misc_feature 1..321: note = Synthetic
  source 1..321: mol_type = other DNA
gatattcaaatgactcaatctccttcttctttatctgcttctgttggtgatcgtgttactattacttgtcgtgcttctcaatctatttcttcttatttaaattggtatcaacaaaaacctggtaaagctcctaaattattaatttatgctgcttcttctttacaatctggtgttccttctcgtttttctggttctggttctggtactgattttactttaactatttcttctttacaacctgaagattttgctacttattattgtcaacaatcttattctactcctcctacttttggtcaaggtactaaagttgaaattaaa

SEQ ID NO: 11 - protein, 10 aa, synthetic construct
  REGION 1..10: note = Synthetic
GVTFNSRTFT

SEQ ID NO: 12 - protein, 8 aa, synthetic construct
  REGION 1..8: note = Synthetic
IIPIFGTI

SEQ ID NO: 13 - protein, 11 aa, synthetic construct
  REGION 1..11: note = Synthetic
ARGGHWNPFDY

SEQ ID NO: 14 - protein, 120 aa, synthetic construct
  REGION 1..120: note = Synthetic
EVQLVQSGSELKKPGSSVKVSCKASGVTFNSRTFTISWVRQAPGQGLEWLGSIIPIFGTITYAQKFQGRVTITADKSTSTAFMELTSLRSEDTAIYYCARGGHWNPFDYWGQGTLVTVSS

SEQ ID NO: 15 - DNA, 360 bp, synthetic construct
  misc_feature 1..360: note = Synthetic
  source 1..360: mol_type = other DNA
gaagttcaattagttcaatctggttctgaattaaaaaaacctggttcttctgttaaagtttcttgtaaagcttctggtgttacttttaattctcgtacttttactatttcttgggttcgtcaagctcctggtcaaggtttagaatggttaggttctattattcctatttttggtactattacttatgctcaaaaatttcaaggtcgtgttactattactgctgataaatctacttctactgcttttatggaattaacttctttacgttctgaagatactgctatttattattgtgctcgtggtggtcattggaatccttttgattattggggtcaaggtactttagttactgtttcttct

SEQ ID NO: 16 - protein, 6 aa, synthetic construct
  REGION 1..6: note = Synthetic
QSISSY

SEQ ID NO: 17 - skipped

SEQ ID NO: 18 - protein, 9 aa, synthetic construct
  REGION 1..9: note = Synthetic
QQSYSTPPT

SEQ ID NO: 19 - protein, 107 aa, synthetic construct; identical to SEQ ID NO: 9
  REGION 1..107: note = Synthetic

SEQ ID NO: 20 - DNA, 321 bp, synthetic construct; identical to SEQ ID NO: 10
  misc_feature 1..321: note = Synthetic
  source 1..321: mol_type = other DNA

SEQ ID NO: 21 - protein, 10 aa, synthetic construct
  REGION 1..10: note = Synthetic
GVSLSSRDYS

SEQ ID NO: 22 - protein, 8 aa, synthetic construct
  REGION 1..8: note = Synthetic
IIPVFGSL

SEQ ID NO: 23 - protein, 11 aa, synthetic construct
  REGION 1..11: note = Synthetic
ARGGHWNPFDP

SEQ ID NO: 24 - protein, 120 aa, synthetic construct
  REGION 1..120: note = Synthetic
EVQLVQSGSELKKPGSSVKVSCKASGVSLSSRDYSISWVRQAPGQGLEWLGSIIPVFGSLTYAQKFQGRVTITADKSTSTAFMELTSLRSEDTAIYYCARGGHWNPFDPWGQGTLVTVSS

SEQ ID NO: 25 - DNA, 360 bp, synthetic construct
  misc_feature 1..360: note = Synthetic
  source 1..360: mol_type = other DNA
gaagttcaattagttcaatctggttctgaattaaaaaaacctggttcttctgttaaagtttcttgtaaagcttctggtgtttctttatcttctcgtgattattctatttcttgggttcgtcaagctcctggtcaaggtttagaatggttaggttctattattcctgtttttggttctttaacttatgctcaaaaatttcaaggtcgtgttactattactgctgataaatctacttctactgcttttatggaattaacttctttacgttctgaagatactgctatttattattgtgctcgtggtggtcattggaatccttttgatccttggggtcaaggtactttagttactgtttcttct

SEQ ID NO: 26 - protein, 6 aa, synthetic construct
  REGION 1..6: note = Synthetic
QSIGSY

SEQ ID NO: 27 - skipped

SEQ ID NO: 28 - protein, 9 aa, synthetic construct
  REGION 1..9: note = Synthetic
QQSYSTPPT

SEQ ID NO: 29 - protein, 107 aa, synthetic construct
  REGION 1..107: note = Synthetic
DIQMTQSPSSLSASVGDRVTITCRASQSIGSYLNWYQQKPGKAPKLLIYSASSLQSGVPSRFSGSGSGTDFTLTISSLQPEDFATYYCQQSYSTPPTFGQGTKVEIK

SEQ ID NO: 30 - DNA, 321 bp, synthetic construct
  misc_feature 1..321: note = Synthetic
  source 1..321: mol_type = other DNA
gatattcaaatgactcaatctccttcttctttatctgcttctgttggtgatcgtgttactattacttgtcgtgcttctcaatctattggttcttatttaaattggtatcaacaaaaacctggtaaagctcctaaattattaatttattctgcttcttctttacaatctggtgttccttctcgtttttctggttctggttctggtactgattttactttaactatttcttctttacaacctgaagattttgctacttattattgtcaacaatcttattctactcctcctacttttggtcaaggtactaaagttgaaattaaa

SEQ ID NO: 31 - protein, 10 aa, synthetic construct
  REGION 1..10: note = Synthetic
GVSLSSRDYS

SEQ ID NO: 32 - protein, 8 aa, synthetic construct
  REGION 1..8: note = Synthetic
FTPIFGTV

SEQ ID NO: 33 - protein, 11 aa, synthetic construct
  REGION 1..11: note = Synthetic
ARGGHWNPFDP

SEQ ID NO: 34 - protein, 120 aa, synthetic construct; identical to SEQ ID NO: 4
  REGION 1..120: note = Synthetic

SEQ ID NO: 35 - DNA, 360 bp, synthetic construct; identical to SEQ ID NO: 5
  misc_feature 1..360: note = Synthetic
  source 1..360: mol_type = other DNA

SEQ ID NO: 36 - protein, 6 aa, synthetic construct
  REGION 1..6: note = Synthetic
QSIGSY

SEQ ID NO: 37 - skipped

SEQ ID NO: 38 - protein, 9 aa, synthetic construct
  REGION 1..9: note = Synthetic
QQSYSTPPT

SEQ ID NO: 39 - protein, 107 aa, synthetic construct; identical to SEQ ID NO: 29
  REGION 1..107: note = Synthetic

SEQ ID NO: 40 - DNA, 321 bp, synthetic construct; identical to SEQ ID NO: 30
  misc_feature 1..321: note = Synthetic
  source 1..321: mol_type = other DNA

SEQ ID NO: 41 - protein, 10 aa, synthetic construct
  REGION 1..10: note = Synthetic
GVTFNSRTFT

SEQ ID NO: 42 - protein, 8 aa, synthetic construct
  REGION 1..8: note = Synthetic
FTPIFGTV

SEQ ID NO: 43 - protein, 11 aa, synthetic construct
  REGION 1..11: note = Synthetic
TRRGNWNPFDP

SEQ ID NO: 44 - protein, 120 aa, synthetic construct
  REGION 1..120: note = Synthetic
EVQLVQSGSELKKPGSSVKVSCKASGVTFNSRTFTISWVRQAPGQGLEWLGSFTPIFGTVTYAQKFQGRVTITADKSTSTAFMELTSLRSEDTAIYYCTRRGNWNPFDPWGQGTLVTVSS

SEQ ID NO: 45 - DNA, 360 bp, synthetic construct
  misc_feature 1..360: note = Synthetic
  source 1..360: mol_type = other DNA
gaagttcaattagttcaatctggttctgaattaaaaaaacctggttcttctgttaaagtttcttgtaaagcttctggtgttacttttaattctcgtacttttactatttcttgggttcgtcaagctcctggtcaaggtttagaatggttaggttcttttactcctatttttggtactgttacttatgctcaaaaatttcaaggtcgtgttactattactgctgataaatctacttctactgcttttatggaattaacttctttacgttctgaagatactgctatttattattgtactcgtcgtggtaattggaatccttttgatccttggggtcaaggtactttagttactgtttcttct

SEQ ID NO: 46 - protein, 6 aa, synthetic construct
  REGION 1..6: note = Synthetic
QSISSY

SEQ ID NO: 47 - skipped

SEQ ID NO: 48 - protein, 9 aa, synthetic construct
  REGION 1..9: note = Synthetic
QQSYSTPPT

SEQ ID NO: 49 - protein, 107 aa, synthetic construct; identical to SEQ ID NO: 9
  REGION 1..107: note = Synthetic

SEQ ID NO: 50 - DNA, 321 bp, synthetic construct; identical to SEQ ID NO: 10
  misc_feature 1..321: note = Synthetic
  source 1..321: mol_type = other DNA

SEQ ID NO: 51 - protein, 10 aa, synthetic construct
  REGION 1..10: note = Synthetic
GFTFTSRGVS

SEQ ID NO: 52 - protein, 8 aa, synthetic construct
  REGION 1..8: note = Synthetic
IIPIFGTI

SEQ ID NO: 53 - protein, 11 aa, synthetic construct
  REGION 1..11: note = Synthetic
ARGGNWNQFDY

SEQ ID NO: 54 - protein, 120 aa, synthetic construct
  REGION 1..120: note = Synthetic
EVQLVQSGSELKKPGSSVKVSCKASGFTFTSRGVSISWVRQAPGQGLEWLGSIIPIFGTITYAQKFQGRVTITADKSTSTAFMELTSLRSEDTAIYYCARGGNWNQFDYWGQGTLVTVSS

SEQ ID NO: 55 - DNA, 360 bp, synthetic construct
  misc_feature 1..360: note = Synthetic
  source 1..360: mol_type = other DNA
gaagttcaattagttcaatctggttctgaattaaaaaaacctggttcttctgttaaagtttcttgtaaagcttctggttttacttttacttctcgtggtgtttctatttcttgggttcgtcaagctcctggtcaaggtttagaatggttaggttctattattcctatttttggtactattacttatgctcaaaaatttcaaggtcgtgttactattactgctgataaatctacttctactgcttttatggaattaacttctttacgttctgaagatactgctatttattattgtgctcgtggtggtaattggaatcaatttgattattggggtcaaggtactttagttactgtttcttct

SEQ ID NO: 56 - protein, 6 aa, synthetic construct
  REGION 1..6: note = Synthetic
QSISSY

SEQ ID NO: 57 - skipped

SEQ ID NO: 58 - protein, 9 aa, synthetic construct
  REGION 1..9: note = Synthetic
QQSYSTPPT

SEQ ID NO: 59 - protein, 107 aa, synthetic construct; identical to SEQ ID NO: 9
  REGION 1..107: note = Synthetic

SEQ ID NO: 60 - DNA, 321 bp, synthetic construct; identical to SEQ ID NO: 10
  misc_feature 1..321: note = Synthetic
  source 1..321: mol_type = other DNA

SEQ ID NO: 61 - protein, 10 aa, synthetic construct
  REGION 1..10: note = Synthetic
GFTFTSRGVS

SEQ ID NO: 62 - protein, 8 aa, synthetic construct
  REGION 1..8: note = Synthetic
IIPIFGTI

SEQ ID NO: 63 - protein, 11 aa, synthetic construct
  REGION 1..11: note = Synthetic
TRRGNWNPFEN

SEQ ID NO: 64 - protein, 120 aa, synthetic construct
  REGION 1..120: note = Synthetic
EVQLVQSGSELKKPGSSVKVSCKASGFTFTSRGVSISWVRQAPGQGLEWLGSIIPIFGTITYAQKFQGRVTITADKSTSTAFMELTSLRSEDTAIYYCTRRGNWNPFENWGQGTLVTVSS

SEQ ID NO: 65 - DNA, 360 bp, synthetic construct
  misc_feature 1..360: note = Synthetic
  source 1..360: mol_type = other DNA
gaagttcaattagttcaatctggttctgaattaaaaaaacctggttcttctgttaaagtttcttgtaaagcttctggttttacttttacttctcgtggtgtttctatttcttgggttcgtcaagctcctggtcaaggtttagaatggttaggttctattattcctatttttggtactattacttatgctcaaaaatttcaaggtcgtgttactattactgctgataaatctacttctactgcttttatggaattaacttctttacgttctgaagatactgctatttattattgtactcgtcgtggtaattggaatccttttgaaaattggggtcaaggtactttagttactgtttcttct

SEQ ID NO: 66 - protein, 6 aa, synthetic construct
  REGION 1..6: note = Synthetic
QSISSY

SEQ ID NO: 67 - skipped

SEQ ID NO: 68 - protein, 9 aa, synthetic construct
  REGION 1..9: note = Synthetic
QQSYSTPPT

SEQ ID NO: 69 - protein, 107 aa, synthetic construct; identical to SEQ ID NO: 9
  REGION 1..107: note = Synthetic

SEQ ID NO: 70 - DNA, 321 bp, synthetic construct; identical to SEQ ID NO: 10
  misc_feature 1..321: note = Synthetic
  source 1..321: mol_type = other DNA

SEQ ID NO: 71 - protein, 10 aa, synthetic construct
  REGION 1..10: note = Synthetic
GVTFNSRTFT

SEQ ID NO: 72 - protein, 8 aa, synthetic construct
  REGION 1..8: note = Synthetic
IIPIFGTI

SEQ ID NO: 73 - protein, 11 aa, synthetic construct
  REGION 1..11: note = Synthetic
ARGGHWNPFDP

SEQ ID NO: 74 - protein, 120 aa, synthetic construct
  REGION 1..120: note = Synthetic
EVQLVQSGSELKKPGSSVKVSCKASGVTFNSRTFTISWVRQAPGQGLEWLGSIIPIFGTITYAQKFQGRVTITADKSTSTAFMELTSLRSEDTAIYYCARGGHWNPFDPWGQGTLVTVSS

SEQ ID NO: 75 - DNA, 360 bp, synthetic construct
  misc_feature 1..360: note = Synthetic
  source 1..360: mol_type = other DNA
gaagttcaattagttcaatctggttctgaattaaaaaaacctggttcttctgttaaagtttcttgtaaagcttctggtgttacttttaattctcgtacttttactatttcttgggttcgtcaagctcctggtcaaggtttagaatggttaggttctattattcctatttttggtactattacttatgctcaaaaatttcaaggtcgtgttactattactgctgataaatctacttctactgcttttatggaattaacttctttacgttctgaagatactgctatttattattgtgctcgtggtggtcattggaatccttttgatccttggggtcaaggtactttagttactgtttcttct

SEQ ID NO: 76 - protein, 6 aa, synthetic construct
  REGION 1..6: note = Synthetic
QSISSY

SEQ ID NO: 77 - skipped

SEQ ID NO: 78 - protein, 9 aa, synthetic construct
  REGION 1..9: note = Synthetic
QQSYSTPPT

SEQ ID NO: 79 - protein, 107 aa, synthetic construct; identical to SEQ ID NO: 9
  REGION 1..107: note = Synthetic

SEQ ID NO: 80 - DNA, 321 bp, synthetic construct; identical to SEQ ID NO: 10
  misc_feature 1..321: note = Synthetic
  source 1..321: mol_type = other DNA

SEQ ID NO: 81 - protein, 10 aa, synthetic construct
  REGION 1..10: note = Synthetic
GVTFNSRTFT

SEQ ID NO: 82 - protein, 8 aa, synthetic construct
  REGION 1..8: note = Synthetic
IIPIFGTI

SEQ ID NO: 83 - protein, 11 aa, synthetic construct
  REGION 1..11: note = Synthetic
TRRGNWNPFDP

SEQ ID NO: 84 - protein, 120 aa, synthetic construct
  REGION 1..120: note = Synthetic
EVQLVQSGSELKKPGSSVKVSCKASGVTFNSRTFTISWVRQAPGQGLEWLGSIIPIFGTITYAQKFQGRVTITADKSTSTAFMELTSLRSEDTAIYYCTRRGNWNPFDPWGQGTLVTVSS

SEQ ID NO: 85 - DNA, 360 bp, synthetic construct
  misc_feature 1..360: note = Synthetic
  source 1..360: mol_type = other DNA
gaagttcaattagttcaatctggttctgaattaaaaaaacctggttcttctgttaaagtttcttgtaaagcttctggtgttacttttaattctcgtacttttactatttcttgggttcgtcaagctcctggtcaaggtttagaatggttaggttctattattcctatttttggtactattacttatgctcaaaaatttcaaggtcgtgttactattactgctgataaatctacttctactgcttttatggaattaacttctttacgttctgaagatactgctatttattattgtactcgtcgtggtaattggaatccttttgatccttggggtcaaggtactttagttactgtttcttct

SEQ ID NO: 86 - protein, 6 aa, synthetic construct
  REGION 1..6: note = Synthetic
QSISSY

SEQ ID NO: 87 - skipped

SEQ ID NO: 88 - protein, 9 aa, synthetic construct
  REGION 1..9: note = Synthetic
QQGYSSPAT

SEQ ID NO: 89 - protein, 107 aa, synthetic construct
  REGION 1..107: note = Synthetic
DIQMTQSPSSLSASVGDRVTITCRASQSISSYLNWYQQKPGKAPKLLIYAASSLQSGVPSRFSGSGSGTDFTLTISSLQPEDFATYYCQQGYSSPATFGQGTKVEIK

SEQ ID NO: 90 - DNA, 321 bp, synthetic construct
  misc_feature 1..321: note = Synthetic
  source 1..321: mol_type = other DNA
gatattcaaatgactcaatctccttcttctttatctgcttctgttggtgatcgtgttactattacttgtcgtgcttctcaatctatttcttcttatttaaattggtatcaacaaaaacctggtaaagctcctaaattattaatttatgctgcttcttctttacaatctggtgttccttctcgtttttctggttctggttctggtactgattttactttaactatttcttctttacaacctgaagattttgctacttattattgtcaacaaggttattcttctcctgctacttttggtcaaggtactaaagttgaaattaaa

SEQ ID NO: 91 - protein, 10 aa, synthetic construct
  REGION 1..10: note = Synthetic
GVSLSSRDYS

SEQ ID NO: 92 - protein, 8 aa, synthetic construct
  REGION 1..8: note = Synthetic
IIPVFGSL

SEQ ID NO: 93 - protein, 11 aa, synthetic construct
  REGION 1..11: note = Synthetic
ARGGHWNPFDP

SEQ ID NO: 94 - protein, 120 aa, synthetic construct; identical to SEQ ID NO: 24
  REGION 1..120: note = Synthetic

SEQ ID NO: 95 - DNA, 360 bp, synthetic construct; identical to SEQ ID NO: 25
  misc_feature 1..360: note = Synthetic
  source 1..360: mol_type = other DNA

SEQ ID NO: 96 - protein, 6 aa, synthetic construct
  REGION 1..6: note = Synthetic
QSVSSG

SEQ ID NO: 97 - skipped

SEQ ID NO: 98 - protein, 9 aa, synthetic construct
  REGION 1..9: note = Synthetic
QQSYSTLPT

SEQ ID NO: 99 - protein, 107 aa, synthetic construct
  REGION 1..107: note = Synthetic
DIQMTQSPSSLSASVGDRVTITCRASQSVSSGLNWYQQKPGKAPKLLIYAASSLQSGVPSRFSGSGSGTDFTLTISSLQPEDFATYYCQQSYSTLPTFGQGTKVEIK

SEQ ID NO: 100 - DNA, 321 bp, synthetic construct
  misc_feature 1..321: note = Synthetic
  source 1..321: mol_type = other DNA
gatattcaaatgactcaatctccttcttctttatctgcttctgttggtgatcgtgttactattacttgtcgtgcttctcaatctgtttcttctggtttaaattggtatcaacaaaaacctggtaaagctcctaaattattaatttatgctgcttcttctttacaatctggtgttccttctcgtttttctggttctggttctggtactgattttactttaactatttcttctttacaacctgaagattttgctacttattattgtcaacaatcttattctactttacctacttttggtcaaggtactaaagttgaaattaaa

SEQ ID NO: 101 - protein, 10 aa, synthetic construct
  REGION 1..10: note = Synthetic
GVSLSSRDYS

SEQ ID NO: 102 - protein, 8 aa, synthetic construct
  REGION 1..8: note = Synthetic
FTPIFGTV

SEQ ID NO: 103 - protein, 11 aa, synthetic construct
  REGION 1..11: note = Synthetic
ARGGHWNPFDP

SEQ ID NO: 104 - protein, 120 aa, synthetic construct; identical to SEQ ID NO: 4
  REGION 1..120: note = Synthetic

SEQ ID NO: 105 - DNA, 360 bp, synthetic construct; identical to SEQ ID NO: 5
  misc_feature 1..360: note = Synthetic
  source 1..360: mol_type = other DNA

SEQ ID NO: 106 - protein, 6 aa, synthetic construct
  REGION 1..6: note = Synthetic
QTVSAY

SEQ ID NO: 107 - skipped

SEQ ID NO: 108 - protein, 9 aa, synthetic construct
  REGION 1..9: note = Synthetic
QQSYSGPPT

SEQ ID NO: 109 - protein, 107 aa, synthetic construct
  REGION 1..107: note = Synthetic
DIQMTQSPSSLSASVGDRVTITCRASQTVSAYLNWYQQKPGKAPKLLIYVSSSLQSGVPSRFSGSGSGTDFTLTISSLQPEDFATYYCQQSYSGPPTFGQGTKVEIK

SEQ ID NO: 110 - DNA, 321 bp, synthetic construct
  misc_feature 1..321: note = Synthetic
  source 1..321: mol_type = other DNA
gatattcaaatgactcaatctccttcttctttatctgcttctgttggtgatcgtgttactattacttgtcgtgcttctcaaactgtttctgcttatttaaattggtatcaacaaaaacctggtaaagctcctaaattattaatttatgtttcttcttctttacaatctggtgttccttctcgtttttctggttctggttctggtactgattttactttaactatttcttctttacaacctgaagattttgctacttattattgtcaacaatcttattctggtcctcctacttttggtcaaggtactaaagttgaaattaaa

SEQ ID NO: 111 - protein, 10 aa, synthetic construct
  REGION 1..10: note = Synthetic
GFTFTSRGVS

SEQ ID NO: 112 - protein, 8 aa, synthetic construct
  REGION 1..8: note = Synthetic
IIPIFGTI

SEQ ID NO: 113 - protein, 11 aa, synthetic construct
  REGION 1..11: note = Synthetic
TRRGNWNPFEN

SEQ ID NO: 114 - protein, 120 aa, synthetic construct; identical to SEQ ID NO: 64
  REGION 1..120: note = Synthetic

SEQ ID NO: 115 - DNA, 360 bp, synthetic construct; identical to SEQ ID NO: 65
  misc_feature 1..360: note = Synthetic
  source 1..360: mol_type = other DNA

SEQ ID NO: 116 - protein, 6 aa, synthetic construct
  REGION 1..6: note = Synthetic
QSVSSG

SEQ ID NO: 117 - skipped

SEQ ID NO: 118 - protein, 9 aa, synthetic construct
  REGION 1..9: note = Synthetic
QQSYSTPPT

SEQ ID NO: 119 - protein, 107 aa, synthetic construct
  REGION 1..107: note = Synthetic
DIQMTQSPSSLSASVGDRVTITCRASQSVSSGLNWYQQKPGKAPKLLIYDASSLQSGVPSRFSGSGSGTDFTLTISSLQPEDFATYYCQQSYSTPPTFGQGTKVEIK

SEQ ID NO: 120 - DNA, 321 bp, synthetic construct
  misc_feature 1..321: note = Synthetic
  source 1..321: mol_type = other DNA
gatattcaaatgactcaatctccttcttctttatctgcttctgttggtgatcgtgttactattacttgtcgtgcttctcaatctgtttcttctggtttaaattggtatcaacaaaaacctggtaaagctcctaaattattaatttatgatgcttcttctttacaatctggtgttccttctcgtttttctggttctggttctggtactgattttactttaactatttcttctttacaacctgaagattttgctacttattattgtcaacaatcttattctactcctcctacttttggtcaaggtactaaagttgaaattaaa

SEQ ID NO: 121 - protein, 10 aa, synthetic construct
  REGION 1..10: note = Synthetic
GFTFTSRGVS

SEQ ID NO: 122 - protein, 8 aa, synthetic construct
  REGION 1..8: note = Synthetic
IIPIFGTI

SEQ ID NO: 123 - protein, 11 aa, synthetic construct
  REGION 1..11: note = Synthetic
TRRGNWNPFEN

SEQ ID NO: 124 - protein, 120 aa, synthetic construct; identical to SEQ ID NO: 64
  REGION 1..120: note = Synthetic

SEQ ID NO: 125 - DNA, 360 bp, synthetic construct; identical to SEQ ID NO: 65
  misc_feature 1..360: note = Synthetic
  source 1..360: mol_type = other DNA

SEQ ID NO: 126 - protein, 6 aa, synthetic construct
  REGION 1..6: note = Synthetic
QTVSAY

SEQ ID NO: 127 - skipped

SEQ ID NO: 128 - protein, 9 aa, synthetic construct
  REGION 1..9: note = Synthetic
QQSYSGPPT

SEQ ID NO: 129 - protein, 107 aa, synthetic construct; identical to SEQ ID NO: 109
  REGION 1..107: note = Synthetic

SEQ ID NO: 130 - DNA, 321 bp, synthetic construct; identical to SEQ ID NO: 110
  misc_feature 1..321: note = Synthetic
  source 1..321: mol_type = other DNA

SEQ ID NO: 131 - protein, 10 aa, synthetic construct
  REGION 1..10: note = Synthetic
GFTFTSRGVS

SEQ ID NO: 132 - protein, 8 aa, synthetic construct
  REGION 1..8: note = Synthetic
IIPIFGTI

SEQ ID NO: 133 - protein, 11 aa, synthetic construct
  REGION 1..11: note = Synthetic
ARGGNWNQFDY

SEQ ID NO: 134 - protein, 120 aa, synthetic construct; identical to SEQ ID NO: 54
  REGION 1..120: note = Synthetic

SEQ ID NO: 135 - DNA, 360 bp, synthetic construct; identical to SEQ ID NO: 55
  misc_feature 1..360: note = Synthetic
  source 1..360: mol_type = other DNA

SEQ ID NO: 136 - protein, 6 aa, synthetic construct
  REGION 1..6: note = Synthetic
QSVSSG

SEQ ID NO: 137 - skipped

SEQ ID NO: 138 - protein, 9 aa, synthetic construct
  REGION 1..9: note = Synthetic
QQSYSTPPT

SEQ ID NO: 139 - protein, 107 aa, synthetic construct; identical to SEQ ID NO: 119
  REGION 1..107: note = Synthetic

SEQ ID NO: 140 - DNA, 321 bp, synthetic construct; identical to SEQ ID NO: 120
  misc_feature 1..321: note = Synthetic
  source 1..321: mol_type = other DNA

SEQ ID NO: 141 - protein, 10 aa, synthetic construct
  REGION 1..10: note = Synthetic
GFTFTSRGVS

SEQ ID NO: 142 - protein, 8 aa, synthetic construct
  REGION 1..8: note = Synthetic
IIPIFGTI

SEQ ID NO: 143 - protein, 11 aa, synthetic construct
  REGION 1..11: note = Synthetic
TRRGNWNPFDY

SEQ ID NO: 144 - protein, 120 aa, synthetic construct
  REGION 1..120: note = Synthetic
EVQLVQSGSELKKPGSSVKVSCKASGFTFTSRGVSISWVRQAPGQGLEWLGSIIPIFGTITYAQKFQGRVTITADKSTSTAFMELTSLRSEDTAIYYCTRRGNWNPFDYWGQGTLVTVSS

SEQ ID NO: 145 - DNA, 360 bp, synthetic construct
  misc_feature 1..360: note = Synthetic
  source 1..360: mol_type = other DNA
gaagttcaattagttcaatctggttctgaattaaaaaaacctggttcttctgttaaagtttcttgtaaagcttctggttttacttttacttctcgtggtgtttctatttcttgggttcgtcaagctcctggtcaaggtttagaatggttaggttctattattcctatttttggtactattacttatgctcaaaaatttcaaggtcgtgttactattactgctgataaatctacttctactgcttttatggaattaacttctttacgttctgaagatactgctatttattattgtactcgtcgtggtaattggaatccttttgattattggggtcaaggtactttagttactgtttcttct

SEQ ID NO: 146 - protein, 6 aa, synthetic construct
  REGION 1..6: note = Synthetic
QSIGSY

SEQ ID NO: 147 - skipped

SEQ ID NO: 148 - protein, 9 aa, synthetic construct
  REGION 1..9: note = Synthetic
QQSYSTPPT

SEQ ID NO: 149 - protein, 107 aa, synthetic construct; identical to SEQ ID NO: 29
  REGION 1..107: note = Synthetic

SEQ ID NO: 150 - DNA, 321 bp, synthetic construct; identical to SEQ ID NO: 30
  misc_feature 1..321: note = Synthetic
  source 1..321: mol_type = other DNA

SEQ ID NO: 151 - protein, 10 aa, synthetic construct
  REGION 1..10: note = Synthetic
GVSLSSRDYS

SEQ ID NO: 152 - protein, 8 aa, synthetic construct
  REGION 1..8: note = Synthetic
IIPVFGSL

SEQ ID NO: 153 - protein, 11 aa, synthetic construct
  REGION 1..11: note = Synthetic
ARGGHWNPFDP

SEQ ID NO: 154 - protein, 120 aa, synthetic construct; identical to SEQ ID NO: 24
  REGION 1..120: note = Synthetic

SEQ ID NO: 155 - DNA, 360 bp, synthetic construct; identical to SEQ ID NO: 25
  misc_feature 1..360: note = Synthetic
  source 1..360: mol_type = other DNA

SEQ ID NO: 156 - protein, 6 aa, synthetic construct
  REGION 1..6: note = Synthetic
QSVSSG

SEQ ID NO: 157 - skipped

SEQ ID NO: 158 - protein, 9 aa, synthetic construct
  REGION 1..9: note = Synthetic
QQSYSTPPT

SEQ ID NO: 159 - protein, 107 aa, synthetic construct; identical to SEQ ID NO: 119
  REGION 1..107: note = Synthetic

SEQ ID NO: 160 - DNA, 321 bp, synthetic construct; identical to SEQ ID NO: 120
  misc_feature 1..321: note = Synthetic
  source 1..321: mol_type = other DNA

SEQ ID NO: 161 - protein, 10 aa, synthetic construct
  REGION 1..10: note = Synthetic
GFTFTSRGVS

SEQ ID NO: 162 - protein, 8 aa, synthetic construct
  REGION 1..8: note = Synthetic
IIPIFGTI

SEQ ID NO: 163 - protein, 11 aa, synthetic construct
  REGION 1..11: note = Synthetic
TRRGNWNPFEN

SEQ ID NO: 164 - protein, 120 aa, synthetic construct; identical to SEQ ID NO: 64
  REGION 1..120: note = Synthetic

SEQ ID NO: 165 - DNA, 360 bp, synthetic construct; identical to SEQ ID NO: 65
  misc_feature 1..360: note = Synthetic
  source 1..360: mol_type = other DNA

SEQ ID NO: 166 - protein, 6 aa, synthetic construct
  REGION 1..6: note = Synthetic
QSVSSG

SEQ ID NO: 167 - skipped

SEQ ID NO: 168 - protein, 9 aa, synthetic construct
  REGION 1..9: note = Synthetic
QQSYSTLPT

SEQ ID NO: 169 - protein, 107 aa, synthetic construct; identical to SEQ ID NO: 99
  REGION 1..107: note = Synthetic

SEQ ID NO: 170 - DNA, 321 bp, synthetic construct; identical to SEQ ID NO: 100
  misc_feature 1..321: note = Synthetic
  source 1..321: mol_type = other DNA

SEQ ID NO: 171 - protein, 10 aa, synthetic construct
  REGION 1..10: note = Synthetic
GVTFNSRTFT

SEQ ID NO: 172 - protein, 8 aa, synthetic construct
  REGION 1..8: note = Synthetic
LLPIFGTA

SEQ ID NO: 173 - protein, 11 aa, synthetic construct
  REGION 1..11: note = Synthetic
TRRGNWNPFDP

SEQ ID NO: 174 - protein, 120 aa, synthetic construct
  REGION 1..120: note = Synthetic
EVQLVQSGSELKKPGSSVKVSCKASGVTFNSRTFTISWVRQAPGQGLEWLGSLLPIFGTATYAQKFQGRVTITADKSTSTAFMELTSLRSEDTAIYYCTRRGNWNPFDPWGQGTLVTVSS

SEQ ID NO: 175 - DNA, 360 bp, synthetic construct
  misc_feature 1..360: note = Synthetic
  source 1..360: mol_type = other DNA
gaagttcaattagttcaatctggttctgaattaaaaaaacctggttcttctgttaaagtttcttgtaaagcttctggtgttacttttaattctcgtacttttactatttcttgggttcgtcaagctcctggtcaaggtttagaatggttaggttctttattacctatttttggtactgctacttatgctcaaaaatttcaaggtcgtgttactattactgctgataaatctacttctactgcttttatggaattaacttctttacgttctgaagatactgctatttattattgtactcgtcgtggtaattggaatccttttgatccttggggtcaaggtactttagttactgtttcttct

SEQ ID NO: 176 - protein, 6 aa, synthetic construct
  REGION 1..6: note = Synthetic
QSISSY

SEQ ID NO: 177 - skipped

SEQ ID NO: 178 - protein, 9 aa, synthetic construct
  REGION 1..9: note = Synthetic
QQSYSTPPT

SEQ ID NO: 179 - protein, 107 aa, synthetic construct; identical to SEQ ID NO: 9
  REGION 1..107: note = Synthetic

SEQ ID NO: 180 - DNA, 321 bp, synthetic construct; identical to SEQ ID NO: 10
  misc_feature 1..321: note = Synthetic
  source 1..321: mol_type = other DNA

SEQ ID NO: 181 - protein, 10 aa, synthetic construct
  REGION 1..10: note = Synthetic
GVTFNSRTFT

SEQ ID NO: 182 - protein, 8 aa, synthetic construct
  REGION 1..8: note = Synthetic
IIPIFGTI

SEQ ID NO: 183 - protein, 11 aa, synthetic construct
  REGION 1..11: note = Synthetic
TRRGNWNPFDY

SEQ ID NO: 184 - protein, 120 aa, synthetic construct
  REGION 1..120: note = Synthetic
EVQLVQSGSELKKPGSSVKVSCKASGVTFNSRTFTISWVRQAPGQGLEWLGSIIPIFGTITYAQKFQGRVTITADKSTSTAFMELTSLRSEDTAIYYCTRRGNWNPFDYWGQGTLVTVSS

SEQ ID NO: 185 - DNA, 360 bp, synthetic construct
  misc_feature 1..360: note = Synthetic
  source 1..360: mol_type = other DNA
gaagttcaattagttcaatctggttctgaattaaaaaaacctggttcttctgttaaagtttcttgtaaagcttctggtgttacttttaattctcgtacttttactatttcttgggttcgtcaagctcctggtcaaggtttagaatggttaggttctattattcctatttttggtactattacttatgctcaaaaatttcaaggtcgtgttactattactgctgataaatctacttctactgcttttatggaattaacttctttacgttctgaagatactgctatttattattgtactcgtcgtggtaattggaatccttttgattattggggtcaaggtactttagttactgtttcttct

SEQ ID NO: 186 - protein, 6 aa, synthetic construct
  REGION 1..6: note = Synthetic
QSISSY

SEQ ID NO: 187 - skipped

SEQ ID NO: 188 - protein, 9 aa, synthetic construct
  REGION 1..9: note = Synthetic
QQSYSTPPT

SEQ ID NO: 189 - protein, 107 aa, synthetic construct; identical to SEQ ID NO: 9
  REGION 1..107: note = Synthetic

SEQ ID NO: 190 - DNA, 321 bp, synthetic construct; identical to SEQ ID NO: 10
  misc_feature 1..321: note = Synthetic
  source 1..321: mol_type = other DNA

SEQ ID NO: 191 - protein, 10 aa, synthetic construct
  REGION 1..10: note = Synthetic
GVTFNSRTFT

SEQ ID NO: 192 - protein, 8 aa, synthetic construct
  REGION 1..8: note = Synthetic
IYPLFGTL

SEQ ID NO: 193 - protein, 11 aa, synthetic construct
  REGION 1..11: note = Synthetic
TRRGNWNPFDP

SEQ ID NO: 194 - protein, 120 aa, synthetic construct
  REGION 1..120: note = Synthetic
EVQLVQSGSELKKPGSSVKVSCKASGVTFNSRTFTISWVRQAPGQGLEWLGSIYPLFGTLTYAQKFQGRVTITADKSTSTAFMELTSLRSEDTAIYYCTRRGNWNPFDPWGQGTLVTVSS

SEQ ID NO: 195 - DNA, 360 bp, synthetic construct
  misc_feature 1..360: note = Synthetic
  source 1..360: mol_type = other DNA
gaagttcaattagttcaatctggttctgaattaaaaaaacctggttcttctgttaaagtttcttgtaaagcttctggtgttacttttaattctcgtacttttactatttcttgggttcgtcaagctcctggtcaaggtttagaatggttaggttctatttatcctttatttggtactttaacttatgctcaaaaatttcaaggtcgtgttactattactgctgataaatctacttctactgcttttatggaattaacttctttacgttctgaagatactgctatttattattgtactcgtcgtggtaattggaatccttttgatccttggggtcaaggtactttagttactgtttcttct

SEQ ID NO: 196 - protein, 6 aa, synthetic construct
  REGION 1..6: note = Synthetic
QSISSY

SEQ ID NO: 197 - skipped

SEQ ID NO: 198 - protein, 9 aa, synthetic construct
  REGION 1..9: note = Synthetic
QQSYSTPPT

SEQ ID NO: 199 - protein, 107 aa, synthetic construct; identical to SEQ ID NO: 9
  REGION 1..107: note = Synthetic

SEQ ID NO: 200 - DNA, 321 bp, synthetic construct; identical to SEQ ID NO: 10
  misc_feature 1..321: note = Synthetic
  source 1..321: mol_type = other DNA

SEQ ID NO: 201 - protein, 10 aa, synthetic construct
  REGION 1..10: note = Synthetic
GVSLSSRDYS

SEQ ID NO: 202 - protein, 8 aa, synthetic construct
  REGION 1..8: note = Synthetic
IIPVFGSL

SEQ ID NO: 203 - protein, 11 aa, synthetic construct
  REGION 1..11: note = Synthetic
ARGGHWNPFDP

SEQ ID NO: 204 - protein, 120 aa, synthetic construct; identical to SEQ ID NO: 24
  REGION 1..120: note = Synthetic

SEQ ID NO: 205 - DNA, 360 bp, synthetic construct; identical to SEQ ID NO: 25
  misc_feature 1..360: note = Synthetic
  source 1..360: mol_type = other DNA

SEQ ID NO: 206 - protein, 6 aa, synthetic construct
  REGION 1..6: note = Synthetic
QTVSAY

SEQ ID NO: 207 - skipped

SEQ ID NO: 208 - protein, 9 aa, synthetic construct
  REGION 1..9: note = Synthetic
QQSYSGPPT

SEQ ID NO: 209 - protein, 107 aa, synthetic construct; identical to SEQ ID NO: 109
  REGION 1..107: note = Synthetic

SEQ ID NO: 210 - DNA, 321 bp, synthetic construct; identical to SEQ ID NO: 110
  misc_feature 1..321: note = Synthetic
  source 1..321: mol_type = other DNA

SEQ ID NO: 211 - protein, 10 aa, synthetic construct
  REGION 1..10: note = Synthetic
GVTFNSRTFT

SEQ ID NO: 212 - protein, 8 aa, synthetic construct
  REGION 1..8: note = Synthetic
IIPVFGSL

SEQ ID NO: 213 - protein, 11 aa, synthetic construct
  REGION 1..11: note = Synthetic
TRRGNWNPFDP

SEQ ID NO: 214 - protein, 120 aa, synthetic construct
  REGION 1..120: note = Synthetic
EVQLVQSGSELKKPGSSVKVSCKASGVTFNSRTFTISWVRQAPGQGLEWLGSIIPVFGSLTYAQKFQGRVTITADKSTSTAFMELTSLRSEDTAIYYCTRRGNWNPFDPWGQGTLVTVSS

SEQ ID NO: 215 - DNA, 360 bp, synthetic construct
  misc_feature 1..360: note = Synthetic
  source 1..360: mol_type = other DNA
gaagttcaattagttcaatctggttctgaattaaaaaaacctggttcttctgttaaagtttcttgtaaagcttctggtgttacttttaattctcgtacttttactatttcttgggttcgtcaagctcctggtcaaggtttagaatggttaggttctattattcctgtttttggttctttaacttatgctcaaaaatttcaaggtcgtgttactattactgctgataaatctacttctactgcttttatggaattaacttctttacgttctgaagatactgctatttattattgtactcgtcgtggtaattggaatccttttgatccttggggtcaaggtactttagttactgtttcttct

SEQ ID NO: 216 - protein, 6 aa, synthetic construct
  REGION 1..6: note = Synthetic
QSISSY

SEQ ID NO: 217 - skipped

SEQ ID NO: 218 - protein, 9 aa, synthetic construct
  REGION 1..9: note = Synthetic
QQSYSTPPT

SEQ ID NO: 219 - protein, 107 aa, synthetic construct; identical to SEQ ID NO: 9
  REGION 1..107: note = Synthetic

SEQ ID NO: 220 - DNA, 321 bp, synthetic construct; identical to SEQ ID NO: 10
  misc_feature 1..321: note = Synthetic
  source 1..321: mol_type = other DNA

SEQ ID NO: 221 - protein, 10 aa, synthetic construct
  REGION 1..10: note = Synthetic
GVTFNSRTFT

SEQ ID NO: 222 - protein, 8 aa, synthetic construct
  REGION 1..8: note = Synthetic
IIPIFGTI

SEQ ID NO: 223 - protein, 11 aa, synthetic construct
  REGION 1..11: note = Synthetic
TRRGNWNPFDP

SEQ ID NO: 224 - protein, 120 aa, synthetic construct; identical to SEQ ID NO: 84
  REGION 1..120: note = Synthetic

SEQ ID NO: 225 - DNA, 360 bp, synthetic construct; identical to SEQ ID NO: 85
  misc_feature 1..360: note = Synthetic
  source 1..360: mol_type = other DNA

SEQ ID NO: 226 - protein, 6 aa, synthetic construct
  REGION 1..6: note = Synthetic
QSISSY

SEQ ID NO: 227 - skipped

SEQ ID NO: 228 - protein, 9 aa, synthetic construct
  REGION 1..9: note = Synthetic
QQSYSEPTT

SEQ ID NO: 229 - protein, 107 aa, synthetic construct
  REGION 1..107: note = Synthetic
DIQMTQSPSSLSASVGDRVTITCRASQSISSYLNWYQQKPGKAPKLLIYAASSLQSGVPSRFSGSGSGTDFTLTISSLQPEDFATYYCQQSYSEPTTFGQGTKVEIK

SEQ ID NO: 230 - DNA, 321 bp, synthetic construct
  misc_feature 1..321: note = Synthetic
  source 1..321: mol_type = other DNA
gatattcaaatgactcaatctccttcttctttatctgcttctgttggtgatcgtgttactattacttgtcgtgcttctcaatctatttcttcttatttaaattggtatcaacaaaaacctggtaaagctcctaaattattaatttatgctgcttcttctttacaatctggtgttccttctcgtttttctggttctggttctggtactgattttactttaactatttcttctttacaacctgaagattttgctacttattattgtcaacaatcttattctgaacctactacttttggtcaaggtactaaagttgaaattaaa

SEQ ID NO: 231 - protein, 10 aa, synthetic construct
  REGION 1..10: note = Synthetic
GVTFNSRTFT

SEQ ID NO: 232 - protein, 8 aa, synthetic construct
  REGION 1..8: note = Synthetic
IIPIFGTI

SEQ ID NO: 233 - protein, 11 aa, synthetic construct
  REGION 1..11: note = Synthetic
TRRGNWNPFDP

SEQ ID NO: 234 - protein, 120 aa, synthetic construct; identical to SEQ ID NO: 84
  REGION 1..120: note = Synthetic

SEQ ID NO: 235 - DNA, 360 bp, synthetic construct; identical to SEQ ID NO: 85
  misc_feature 1..360: note = Synthetic
  source 1..360: mol_type = other DNA

SEQ ID NO: 236 - protein, 6 aa, synthetic construct
  REGION 1..6: note = Synthetic
QSIGSY

SEQ ID NO: 237 - skipped

SEQ ID NO: 238 - protein, 9 aa, synthetic construct
  REGION 1..9: note = Synthetic
QQSYSTPPT

SEQ ID NO: 239 - protein, 107 aa, synthetic construct; identical to SEQ ID NO: 29
  REGION 1..107: note = Synthetic

SEQ ID NO: 240 - DNA, 321 bp, synthetic construct; identical to SEQ ID NO: 30
  misc_feature 1..321: note = Synthetic
  source 1..321: mol_type = other DNA

SEQ ID NO: 241 - protein, 10 aa, synthetic construct
  REGION 1..10: note = Synthetic
GFTFTSRGVS

SEQ ID NO: 242 - protein, 8 aa, synthetic construct
  REGION 1..8: note = Synthetic
IIPIFGTI

SEQ ID NO: 243 - protein, 11 aa, synthetic construct
  REGION 1..11: note = Synthetic
TRRGNWNPFDY

SEQ ID NO: 244 - protein, 120 aa, synthetic construct; identical to SEQ ID NO: 144
  REGION 1..120: note = Synthetic

SEQ ID NO: 245 - DNA, 360 bp, synthetic construct; identical to SEQ ID NO: 145
  misc_feature 1..360: note = Synthetic
  source 1..360: mol_type = other DNA

SEQ ID NO: 246 - protein, 6 aa, synthetic construct
  REGION 1..6: note = Synthetic
QTVSAY

SEQ ID NO: 247 - skipped

SEQ ID NO: 248 - protein, 9 aa, synthetic construct
  REGION 1..9: note = Synthetic
QQSYSGPPT

SEQ ID NO: 249 - protein, 107 aa, synthetic construct; identical to SEQ ID NO: 109
  REGION 1..107: note = Synthetic

SEQ ID NO: 250 - DNA, 321 bp, synthetic construct; identical to SEQ ID NO: 110
  misc_feature 1..321: note = Synthetic
  source 1..321: mol_type = other DNA

SEQ ID NO: 251 - protein, 10 aa, synthetic construct
  REGION 1..10: note = Synthetic
GVSISSVAFT

SEQ ID NO: 252 - protein, 8 aa, synthetic construct
  REGION 1..8: note = Synthetic
FTPIFGTV

SEQ ID NO: 253 - protein, 11 aa, synthetic construct
  REGION 1..11: note = Synthetic
ARGGHWNPFDP

SEQ ID NO: 254 - protein, 120 aa, synthetic construct
  REGION 1..120: note = Synthetic
EVQLVQSGSELKKPGSSVKVSCKASGVSISSVAFTISWVRQAPGQGLEWLGSFTPIFGTVTYAQKFQGRVTITADKSTSTAFMELTSLRSEDTAIYYCARGGHWNPFDPWGQGTLVTVSS

SEQ ID NO: 255 - DNA, 360 bp, synthetic construct
  misc_feature 1..360: note = Synthetic
  source 1..360: mol_type = other DNA
gaagttcaattagttcaatctggttctgaattaaaaaaacctggttcttctgttaaagtttcttgtaaagcttctggtgtttctatttcttctgttgcttttactatttcttgggttcgtcaagctcctggtcaaggtttagaatggttaggttcttttactcctatttttggtactgttacttatgctcaaaaatttcaaggtcgtgttactattactgctgataaatctacttctactgcttttatggaattaacttctttacgttctgaagatactgctatttattattgtgctcgtggtggtcattggaatccttttgatccttggggtcaaggtactttagttactgtttcttct

SEQ ID NO: 256 - protein, 6 aa, synthetic construct
  REGION 1..6: note = Synthetic
QSISSY

SEQ ID NO: 257 - skipped

SEQ ID NO: 258 - protein, 9 aa, synthetic construct
  REGION 1..9: note = Synthetic
QQSYSTPPT

SEQ ID NO: 259 - protein, 107 aa, synthetic construct; identical to SEQ ID NO: 9
  REGION 1..107: note = Synthetic

SEQ ID NO: 260 - DNA, 321 bp, synthetic construct; identical to SEQ ID NO: 10
  misc_feature 1..321: note = Synthetic
  source 1..321: mol_type = other DNA

SEQ ID NO: 261 - protein, 10 aa, synthetic construct
  REGION 1..10: note = Synthetic
GFTFTSRGVS

SEQ ID NO: 262 - protein, 8 aa, synthetic construct
  REGION 1..8: note = Synthetic
IIPIFGTI

SEQ ID NO: 263 - protein, 11 aa, synthetic construct
  REGION 1..11: note = Synthetic
TRRGNWNPFDY

SEQ ID NO: 264 - protein, 120 aa, synthetic construct; identical to SEQ ID NO: 144
  REGION 1..120: note = Synthetic

SEQ ID NO: 265 - DNA, 360 bp, synthetic construct; identical to SEQ ID NO: 145
  misc_feature 1..360: note = Synthetic
  source 1..360: mol_type = other DNA

SEQ ID NO: 266 - protein, 6 aa, synthetic construct
  REGION 1..6: note = Synthetic
QSVSSG

SEQ ID NO: 267 - skipped

SEQ ID NO: 268 - protein, 9 aa, synthetic construct
  REGION 1..9: note = Synthetic
QQSYSTPPT

SEQ ID NO: 269 - protein, 107 aa, synthetic construct; identical to SEQ ID NO: 119
  REGION 1..107: note = Synthetic

SEQ ID NO: 270 - DNA, 321 bp, synthetic construct; identical to SEQ ID NO: 120
  misc_feature 1..321: note = Synthetic
  source 1..321: mol_type = other DNA

SEQ ID NO: 271 - protein, 10 aa, synthetic construct
  REGION 1..10: note = Synthetic
GVSISSVAFT

SEQ ID NO: 272 - protein, 8 aa, synthetic construct
  REGION 1..8: note = Synthetic
IIPIFGTI

SEQ ID NO: 273 - protein, 11 aa, synthetic construct
  REGION 1..11: note = Synthetic
TRRGNWNPFDP

SEQ ID NO: 274 - protein, 120 aa, synthetic construct
  REGION 1..120: note = Synthetic
EVQLVQSGSELKKPGSSVKVSCKASGVSISSVAFTISWVRQAPGQGLEWLGSIIPIFGTITYAQKFQGRVTITADKSTSTAFMELTSLRSEDTAIYYCTRRGNWNPFDPWGQGTLVTVSS

SEQ ID NO: 275 - DNA, 360 bp, synthetic construct
  misc_feature 1..360: note = Synthetic
  source 1..360: mol_type = other DNA
gaagttcaattagttcaatctggttctgaattaaaaaaacctggttcttctgttaaagtttcttgtaaagcttctggtgtttctatttcttctgttgcttttactatttcttgggttcgtcaagctcctggtcaaggtttagaatggttaggttctattattcctatttttggtactattacttatgctcaaaaatttcaaggtcgtgttactattactgctgataaatctacttctactgcttttatggaattaacttctttacgttctgaagatactgctatttattattgtactcgtcgtggtaattggaatccttttgatccttggggtcaaggtactttagttactgtttcttct

SEQ ID NO: 276 - protein, 6 aa, synthetic construct
  REGION 1..6: note = Synthetic
QSISSY

SEQ ID NO: 277 - skipped

SEQ ID NO: 278 - protein, 9 aa, synthetic construct
  REGION 1..9: note = Synthetic
QQSYSTPPT

SEQ ID NO: 279 - protein, 107 aa, synthetic construct; identical to SEQ ID NO: 9
  REGION 1..107: note = Synthetic

SEQ ID NO: 280 - DNA, 321 bp, synthetic construct; identical to SEQ ID NO: 10
  misc_feature 1..321: note = Synthetic
  source 1..321: mol_type = other DNA

SEQ ID NO: 281 - protein, 10 aa, synthetic construct
  REGION 1..10: note = Synthetic
GVTFNSRTFT

SEQ ID NO: 282 - protein, 8 aa, synthetic construct
  REGION 1..8: note = Synthetic
IIPIFGTI

SEQ ID NO: 283 - protein, 11 aa, synthetic construct
  REGION 1..11: note = Synthetic
TRRGNWNPFDP

SEQ ID NO: 284 - protein, 120 aa, synthetic construct; identical to SEQ ID NO: 84
  REGION 1..120: note = Synthetic

SEQ ID NO: 285 - DNA, 360 bp, synthetic construct; identical to SEQ ID NO: 85
  misc_feature 1..360: note = Synthetic
  source 1..360: mol_type = other DNA

SEQ ID NO: 286 - protein, 6 aa, synthetic construct
  REGION 1..6: note = Synthetic
QSISSY

SEQ ID NO: 287 - skipped

SEQ ID NO: 288 - protein, 9 aa, synthetic construct
  REGION 1..9: note = Synthetic
QQSYGNPPT

SEQ ID NO: 289 - protein, 107 aa, synthetic construct
  REGION 1..107: note = Synthetic
DIQMTQSPSSLSASVGDRVTITCRASQSISSYLNWYQQKPGKAPKLLIYAASSLQSGVPSRFSGSGSGTDFTLTISSLQPEDFATYYCQQSYGNPPTFGQGTKVEIK

SEQ ID NO: 290 - DNA, 321 bp, synthetic construct
  misc_feature 1..321: note = Synthetic
  source 1..321: mol_type = other DNA
gatattcaaatgactcaatctccttcttctttatctgcttctgttggtgatcgtgttactattacttgtcgtgcttctcaatctatttcttcttatttaaattggtatcaacaaaaacctggtaaagctcctaaattattaatttatgctgcttcttctttacaatctggtgttccttctcgtttttctggttctggttctggtactgattttactttaactatttcttctttacaacctgaagattttgctacttattattgtcaacaatcttatggtaatcctcctacttttggtcaaggtactaaagttgaaattaaa

SEQ ID NO: 291 - protein, 10 aa, synthetic construct
  REGION 1..10: note = Synthetic
GVSLSSRDYS

SEQ ID NO: 292 - protein, 8 aa, synthetic construct
  REGION 1..8: note = Synthetic
FTPIFGTV

SEQ ID NO: 293 - protein, 11 aa, synthetic construct
  REGION 1..11: note = Synthetic
ARGGHWNPFDP

SEQ ID NO: 294 - protein, 120 aa, synthetic construct; identical to SEQ ID NO: 4
  REGION 1..120: note = Synthetic

SEQ ID NO: 295 - DNA, 360 bp, synthetic construct; identical to SEQ ID NO: 5
  misc_feature 1..360: note = Synthetic
  source 1..360: mol_type = other DNA

SEQ ID NO: 296 - protein, 6 aa, synthetic construct
  REGION 1..6: note = Synthetic
QSVSSG

SEQ ID NO: 297 - skipped

SEQ ID NO: 298 - protein, 9 aa, synthetic construct
  REGION 1..9: note = Synthetic
QQSYSTPPT

SEQ ID NO: 299 - protein, 107 aa, synthetic construct; identical to SEQ ID NO: 119
  REGION 1..107: note = Synthetic

SEQ ID NO: 300 - DNA, 321 bp, synthetic construct; identical to SEQ ID NO: 120
  misc_feature 1..321: note = Synthetic
  source 1..321: mol_type = other DNA

SEQ ID NO: 301 - protein, 10 aa, synthetic construct
  REGION 1..10: note = Synthetic
GFTFTSRGVS

SEQ ID NO: 302 - protein, 8 aa, synthetic construct
  REGION 1..8: note = Synthetic
IIPIFGTI

SEQ ID NO: 303 - protein, 11 aa, synthetic construct
  REGION 1..11: note = Synthetic
ARGGNWNQFDY

SEQ ID NO: 304 - protein, 120 aa, synthetic construct; identical to SEQ ID NO: 54
  REGION 1..120: note = Synthetic

SEQ ID NO: 305 - DNA, 360 bp, synthetic construct; identical to SEQ ID NO: 55
  misc_feature 1..360: note = Synthetic
  source 1..360: mol_type = other DNA

SEQ ID NO: 306 - protein, 6 aa, synthetic construct
  REGION 1..6: note = Synthetic
QTVSAY

SEQ ID NO: 307 - skipped

SEQ ID NO: 308 - protein, 9 aa, synthetic construct
  REGION 1..9: note = Synthetic
QQSYSGPPT

SEQ ID NO: 309 - protein, 107 aa, synthetic construct; identical to SEQ ID NO: 109
  REGION 1..107: note = Synthetic

SEQ ID NO: 310 - DNA, 321 bp, synthetic construct; identical to SEQ ID NO: 110
  misc_feature 1..321: note = Synthetic
  source 1..321: mol_type = other DNA

SEQ ID NO: 311 - protein, 10 aa, synthetic construct
  REGION 1..10: note = Synthetic
GVSLSSRDYS

SEQ ID NO: 312 - protein, 8 aa, synthetic construct
  REGION 1..8: note = Synthetic
FTPIFGTV

SEQ ID NO: 313 - protein, 11 aa, synthetic construct
  REGION 1..11: note = Synthetic
ARGGHWNPFDP

SEQ ID NO: 314 - protein, 120 aa, synthetic construct; identical to SEQ ID NO: 4
  REGION 1..120: note = Synthetic

SEQ ID NO: 315 - DNA, 360 bp, synthetic construct; identical to SEQ ID NO: 5
  misc_feature 1..360: note = Synthetic
  source 1..360: mol_type = other DNA

SEQ ID NO: 316 - protein, 6 aa, synthetic construct
  REGION 1..6: note = Synthetic
QSSSSY

SEQ ID NO: 317 - skipped

SEQ ID NO: 318 - protein, 9 aa, synthetic construct
  REGION 1..9: note = Synthetic
QQSYGNPPT

SEQ ID NO: 319 - protein, 107 aa, synthetic construct
  REGION 1..107: note = Synthetic
DIQMTQSPSSLSASVGDRVTITCRASQSSSSYLNWYQQKPGKAPKLLIYVSSSLQSGVPSRFSGSGSGTDFTLTISSLQPEDFATYYCQQSYGNPPTFGQGTKVEIK

SEQ ID NO: 320 - DNA, 321 bp, synthetic construct
  misc_feature 1..321: note = Synthetic
  source 1..321: mol_type = other DNA
gatattcaaatgactcaatctccttcttctttatctgcttctgttggtgatcgtgttactattacttgtcgtgcttctcaatcttcttcttcttatttaaattggtatcaacaaaaacctggtaaagctcctaaattattaatttatgtttcttcttctttacaatctggtgttccttctcgtttttctggttctggttctggtactgattttactttaactatttcttctttacaacctgaagattttgctacttattattgtcaacaatcttatggtaatcctcctacttttggtcaaggtactaaagttgaaattaaa

SEQ ID NO: 321 - protein, 10 aa, synthetic construct
  REGION 1..10: note = Synthetic
GFTFTSRGVS

SEQ ID NO: 322 - protein, 8 aa, synthetic construct
  REGION 1..8: note = Synthetic
IIPIFGTI

SEQ ID NO: 323 - protein, 11 aa, synthetic construct
  REGION 1..11: note = Synthetic
TRRGNWNPFDY

SEQ ID NO: 324 - protein, 120 aa, synthetic construct; identical to SEQ ID NO: 144
  REGION 1..120: note = Synthetic

SEQ ID NO: 325 - DNA, 360 bp, synthetic construct; identical to SEQ ID NO: 145
  misc_feature 1..360: note = Synthetic
  source 1..360: mol_type = other DNA

SEQ ID NO: 326 - protein, 6 aa, synthetic construct
  REGION 1..6: note = Synthetic
QSVSSG

SEQ ID NO: 327 - skipped

SEQ ID NO: 328 - protein, 9 aa, synthetic construct
  REGION 1..9: note = Synthetic
QQSYSTLPT

SEQ ID NO: 329 - protein, 107 aa, synthetic construct; identical to SEQ ID NO: 99
  REGION 1..107: note = Synthetic

SEQ ID NO: 330 - DNA, 321 bp, synthetic construct; identical to SEQ ID NO: 100
  misc_feature 1..321: note = Synthetic
  source 1..321: mol_type = other DNA

SEQ ID NO: 331 - protein, 10 aa, synthetic construct
  REGION 1..10: note = Synthetic
GVTFNSRTFT

SEQ ID NO: 332 - protein, 8 aa, synthetic construct
  REGION 1..8: note = Synthetic
IIPIFGTI

SEQ ID NO: 333 - protein, 11 aa, synthetic construct
  REGION 1..11: note = Synthetic
TRRGNWNPFDP

SEQ ID NO: 334 - protein, 120 aa, synthetic construct; identical to SEQ ID NO: 84
  REGION 1..120: note = Synthetic

SEQ ID NO: 335 - DNA, 360 bp, synthetic construct; identical to SEQ ID NO: 85
  misc_feature 1..360: note = Synthetic
  source 1..360: mol_type = other DNA

SEQ ID NO: 336 - protein, 6 aa, synthetic construct
  REGION 1..6: note = Synthetic
QSVSSG

SEQ ID NO: 337 - skipped

SEQ ID NO: 338 - protein, 9 aa, synthetic construct
  REGION 1..9: note = Synthetic
QQSYSTLPT

SEQ ID NO: 339 - protein, 107 aa, synthetic construct; identical to SEQ ID NO: 99
  REGION 1..107: note = Synthetic

SEQ ID NO: 340 - DNA, 321 bp, synthetic construct; identical to SEQ ID NO: 100
  misc_feature 1..321: note = Synthetic
  source 1..321: mol_type = other DNA

SEQ ID NO: 341 - protein, 10 aa, synthetic construct
  REGION 1..10: note = Synthetic
GFTFTSRGVS

SEQ ID NO: 342 - protein, 8 aa, synthetic construct
  REGION 1..8: note = Synthetic
IIPIFGTI

SEQ ID NO: 343 - protein, 11 aa, synthetic construct
  REGION 1..11: note = Synthetic
TRRGNWNPFDP

SEQ ID NO: 344 - protein, 120 aa, synthetic construct
  REGION 1..120: note = Synthetic
EVQLVQSGSELKKPGSSVKVSCKASGFTFTSRGVSISWVRQAPGQGLEWLGSIIPIFGTITYAQKFQGRVTITADKSTSTAFMELTSLRSEDTAIYYCTRRGNWNPFDPWGQGTLVTVSS

SEQ ID NO: 345 - DNA, 360 bp, synthetic construct
  misc_feature 1..360: note = Synthetic
  source 1..360: mol_type = other DNA
gaagttcaattagttcaatctggttctgaattaaaaaaacctggttcttctgttaaagtttcttgtaaagcttctggttttacttttacttctcgtggtgtttctatttcttgggttcgtcaagctcctggtcaaggtttagaatggttaggttctattattcctatttttggtactattacttatgctcaaaaatttcaaggtcgtgttactattactgctgataaatctacttctactgcttttatggaattaacttctttacgttctgaagatactgctatttattattgtactcgtcgtggtaattggaatccttttgatccttggggtcaaggtactttagttactgtttcttct

SEQ ID NO: 346 - protein, 6 aa, synthetic construct
  REGION 1..6: note = Synthetic
QSISSY

SEQ ID NO: 347 - skipped

SEQ ID NO: 348 - protein, 9 aa, synthetic construct
  REGION 1..9: note = Synthetic
QQSYSTPPT

SEQ ID NO: 349 - protein, 107 aa, synthetic construct; identical to SEQ ID NO: 9
  REGION 1..107: note = Synthetic

SEQ ID NO: 350 - DNA, 321 bp, synthetic construct; identical to SEQ ID NO: 10
  misc_feature 1..321: note = Synthetic
  source 1..321: mol_type = other DNA

SEQ ID NO: 351 - protein, 10 aa, synthetic construct
  REGION 1..10: note = Synthetic
GFTFTSRGVS

SEQ ID NO: 352 - protein, 8 aa, synthetic construct
  REGION 1..8: note = Synthetic
IIPIFGTI

SEQ ID NO: 353 - protein, 11 aa, synthetic construct
  REGION 1..11: note = Synthetic
ARGGNWNQFDY

SEQ ID NO: 354 - protein, 120 aa, synthetic construct; identical to SEQ ID NO: 54
  REGION 1..120: note = Synthetic

SEQ ID NO: 355 - DNA, 360 bp, synthetic construct; identical to SEQ ID NO: 55
  misc_feature 1..360: note = Synthetic
  source 1..360: mol_type = other DNA

SEQ ID NO: 356 - protein, 6 aa, synthetic construct
  REGION 1..6: note = Synthetic
QSIGSY

SEQ ID NO: 357 - skipped

SEQ ID NO: 358 - protein, 9 aa, synthetic construct
  REGION 1..9: note = Synthetic
QQSYSTPPT

SEQ ID NO: 359 - protein, 107 aa, synthetic construct; identical to SEQ ID NO: 29
  REGION 1..107: note = Synthetic

SEQ ID NO: 360 - DNA, 321 bp, synthetic construct; identical to SEQ ID NO: 30
  misc_feature 1..321: note = Synthetic
  source 1..321: mol_type = other DNA

SEQ ID NO: 361 - protein, 10 aa, synthetic construct
  REGION 1..10: note = Synthetic
GFTFTSRGVS

SEQ ID NO: 362 - protein, 8 aa, synthetic construct
  REGION 1..8: note = Synthetic
IIPIFGTI

SEQ ID NO: 363 - protein, 11 aa, synthetic construct
  REGION 1..11: note = Synthetic
TRRGNWNPFEN

SEQ ID NO: 364 - protein, 120 aa, synthetic construct; identical to SEQ ID NO: 64
  REGION 1..120: note = Synthetic

SEQ ID NO: 365 - DNA, 360 bp, synthetic construct; identical to SEQ ID NO: 65
  misc_feature 1..360: note = Synthetic
  source 1..360: mol_type = other DNA

SEQ ID NO: 366 - protein, 6 aa, synthetic construct
  REGION 1..6: note = Synthetic
QSIGSY

SEQ ID NO: 367 - skipped

SEQ ID NO: 368 - protein, 9 aa, synthetic construct
  REGION 1..9: note = Synthetic
QQSYSTPPT

SEQ ID NO: 369 - protein, 107 aa, synthetic construct; identical to SEQ ID NO: 29
  REGION 1..107: note = Synthetic

SEQ ID NO: 370 - DNA, 321 bp, synthetic construct; identical to SEQ ID NO: 30
  misc_feature 1..321: note = Synthetic
  source 1..321: mol_type = other DNA

SEQ ID NO: 371 - protein, 10 aa, synthetic construct
  REGION 1..10: note = Synthetic
GVTFNSRTFT

SEQ ID NO: 372 - protein, 8 aa, synthetic construct
  REGION 1..8: note = Synthetic
IIPIFGTI

SEQ ID NO: 373 - protein, 11 aa, synthetic construct
  REGION 1..11: note = Synthetic
TRRGNWNPFDP

SEQ ID NO: 374 - protein, 120 aa, synthetic construct; identical to SEQ ID NO: 84
  REGION 1..120: note = Synthetic

SEQ ID NO: 375 - DNA, 360 bp, synthetic construct; identical to SEQ ID NO: 85
  misc_feature 1..360: note = Synthetic
  source 1..360: mol_type = other DNA

SEQ ID NO: 376 - protein, 6 aa, synthetic construct
  REGION 1..6: note = Synthetic
QTVSAY

SEQ ID NO: 377 - skipped

SEQ ID NO: 378 - protein, 9 aa, synthetic construct
  REGION 1..9: note = Synthetic
QQSYSGPPT

SEQ ID NO: 379 - protein, 107 aa, synthetic construct; identical to SEQ ID NO: 109
  REGION 1..107: note = Synthetic

SEQ ID NO: 380 - DNA, 321 bp, synthetic construct; identical to SEQ ID NO: 110
  misc_feature 1..321: note = Synthetic
  source 1..321: mol_type = other DNA

SEQ ID NO: 381 - protein, 10 aa, synthetic construct
  REGION 1..10: note = Synthetic
GVTFRTSAIS

SEQ ID NO: 382 - protein, 8 aa, synthetic construct
  REGION 1..8: note = Synthetic
IIPIFGTI

SEQ ID NO: 383 - protein, 11 aa, synthetic construct
  REGION 1..11: note = Synthetic
TRRGNWNPFDP

SEQ ID NO: 384 - protein, 120 aa, synthetic construct
  REGION 1..120: note = Synthetic
EVQLVQSGSELKKPGSSVKVSCKASGVTFRTSAISISWVRQAPGQGLEWLGSIIPIFGTITYAQKFQGRVTITADKSTSTAFMELTSLRSEDTAIYYCTRRGNWNPFDPWGQGTLVTVSS

SEQ ID NO: 385 - DNA, 360 bp, synthetic construct
  misc_feature 1..360: note = Synthetic
  source 1..360: mol_type = other DNA
gaagttcaattagttcaatctggttctgaattaaaaaaacctggttcttctgttaaagtttcttgtaaagcttctggtgttacttttcgtacttctgctatttctatttcttgggttcgtcaagctcctggtcaaggtttagaatggttaggttctattattcctatttttggtactattacttatgctcaaaaatttcaaggtcgtgttactattactgctgataaatctacttctactgcttttatggaattaacttctttacgttctgaagatactgctatttattattgtactcgtcgtggtaattggaatccttttgatccttggggtcaaggtactttagttactgtttcttct

SEQ ID NO: 386 - protein, 6 aa, synthetic construct
  REGION 1..6: note = Synthetic
QSISSY

SEQ ID NO: 387 - skipped

SEQ ID NO: 388 - protein, 9 aa, synthetic construct
  REGION 1..9: note = Synthetic
QQSYSTPPT

SEQ ID NO: 389 - protein, 107 aa, synthetic construct; identical to SEQ ID NO: 9
  REGION 1..107: note = Synthetic

SEQ ID NO: 390 - DNA, 321 bp, synthetic construct; identical to SEQ ID NO: 10
  misc_feature 1..321: note = Synthetic
  source 1..321: mol_type = other DNA

SEQ ID NO: 391 - protein, 8 aa, synthetic construct
  REGION 1..8: note = Synthetic
GYSFTSYY

SEQ ID NO: 392 - protein, 8 aa, synthetic construct
  REGION 1..8: note = Synthetic
ILPGSGST

SEQ ID NO: 393 - protein, 12 aa, synthetic construct
  REGION 1..12: note = Synthetic
AKGGGSLWYFDV

SEQ ID NO: 394 - protein, 119 aa, synthetic construct
  REGION 1..119: note = Synthetic
QAYLQQSGTELVKPGASVKLSCKASGYSFTSYYMFWVKKRPGQGLEWIGEILPGSGSTNYNEQFKGKATFTADPSSNTAYMQLSSLTSEDSAVYYCAKGGGSLWYFDVWGAGTTVTVSS

SEQ ID NO: 395 - DNA, 357 bp, synthetic construct
  misc_feature 1..357: note = Synthetic
  source 1..357: mol_type = other DNA
caggcatatctgcagcaatctgggacggaactggtaaaacccggagccagcgtgaagctttcgtgcaaggcctccggctactccttcacatcctactatatgttttgggtcaagaagaggcctggtcagggactcgagtggatcggggagattttaccaggcagcggctccactaattacaacgaacaattcaaagggaaggcgacctttaccgccgatccctcaagtaacaccgcatacatgcagctgtccagcttgacatctgaggacagcgccgtgtattactgtgctaaaggaggcgggagcctctggtatttcgacgtgtggggagctggcaccacagttactgtcagttca

SEQ ID NO: 396 - protein, 11 aa, synthetic construct
  REGION 1..11: note = Synthetic
QSLVHSNGNTY

SEQ ID NO: 397 - skipped

SEQ ID NO: 398 - protein, 10 aa, synthetic construct
  REGION 1..10: note = Synthetic
SQSTHVPPYT

SEQ ID NO: 399 - protein, 113 aa, synthetic construct
  REGION 1..113: note = Synthetic
DVVMTQTPLSLPVSLGDQASISCRSSQSLVHSNGNTYLHWYLQKPGQSPKLLIYKVSNRFSGVPDRFSGSGSGTDFTLKISRVEAEDLGVYFCSQSTHVPPYTFGGGTKLEIK

SEQ ID NO: 400 - DNA, 339 bp, synthetic construct
  misc_feature 1..339: note = Synthetic
  source 1..339: mol_type = other DNA
gacgttgtgatgacgcagactccactgtctctaccagtatccctcggcgatcaagcttccataagttgccggtccagccagagcctggtgcacagtaacggcaatacctatcttcactggtacctccagaagcctggacagagccctaaattgcttatctacaaggtgagtaaccgtttctctggtgtccccgaccgattcagcggttccggatcagggacagattttacactgaagatctctcgcgtggaggccgaggacctgggagtctacttttgttcacaaagcacccatgtccccccgtataccttcggcggggggactaaattagaaataaag

SEQ ID NO: 401 - protein, 8 aa, synthetic construct
  REGION 1..8: note = Synthetic
GFPFGNYL

SEQ ID NO: 402 - protein, 8 aa, synthetic construct
  REGION 1..8: note = Synthetic
ISGGGVST

SEQ ID NO: 403 - protein, 12 aa, synthetic construct
  REGION 1..12: note = Synthetic
ARGPSSWPAFDV

SEQ ID NO: 404 - protein, 118 aa, synthetic construct
  REGION 1..118: note = Synthetic
EVQLLESGGGLVQPGGSLRLSCAASGFPFGNYLMNWVRQAPGKGLEWVSVISGGGVSTYYADSVKGRFTISRDNSKNTLYLQMNSLRAEDTAVYCARGPSSWPAFDVWGQGTLVTVSS

SEQ ID NO: 405 - DNA, 354 bp, synthetic construct
  misc_feature 1..354: note = Synthetic
  source 1..354: mol_type = other DNA
gaggtgcaactgttagagtctggggggggacttgtgcagccaggcggttccctgaggttaagttgcgcagccagtggcttcccgttcggcaattatctgatgaactgggtgcggcaggcacctgggaagggattggaatgggtcagcgtcatttcagggggaggcgtctcgacgtactacgccgactccgtaaaaggccgatttaccatctcccgcgataacagcaagaacaccctatacctgcagatgaatagcctcagggccgaagacacagccgtgtattgtgctcgtggaccctcttcctggcccgcttttgatgtgtggggccagggtacactcgttactgtttcaagc

SEQ ID NO: 406 - protein, 11 aa, synthetic construct
  REGION 1..11: note = Synthetic
QSLVHSNGNTY

SEQ ID NO: 407 - skipped

SEQ ID NO: 408 - protein, 10 aa, synthetic construct
  REGION 1..10: note = Synthetic
SQSTHVPPYT

SEQ ID NO: 409 - protein, 113 aa, synthetic construct; identical to SEQ ID NO: 399
  REGION 1..113: note = Synthetic

SEQ ID NO: 410 - DNA, 339 bp, synthetic construct
  misc_feature 1..339: note = Synthetic
  source 1..339: mol_type = other DNA
gacgttgtgatgacgcagactccactgtctctaccagtatccctcggcgatcaagcttccataagttgccggtccagccagagcctggtgcacagtaacggcaatacctatcttcactggtacctccagaagcctggacagagccctaaattgcttatctacaaggtgagtaaccgtttctctggtgtccccgaccgattcagcggttccggatcagggacagattttacactgaagatctctcgcgtggaggccgaggacctgggagtctacttttgttcacaaagcacccatgtccccccgtataccttcggcggggggactaaattagaaattaaa

SEQ ID NO: 411 - protein, 8 aa, synthetic construct
  REGION 1..8: note = Synthetic
GFNIKDTY

SEQ ID NO: 412 - protein, 8 aa, synthetic construct
  REGION 1..8: note = Synthetic
IDPENGNT

SEQ ID NO: 413 - protein, 6 aa, synthetic construct
  REGION 1..6: note = Synthetic
IRSGHY

SEQ ID NO: 414 - protein, 113 aa, synthetic construct
  REGION 1..113: note = Synthetic
EVRLQQSGAELVKPGASVKLSCTASGFNIKDTYMHWVKQRPEQGLEWIGWIDPENGNTKYDPKFQGKATITTDTSSNTAYLQLSSLTSEDSAVYYCIRSGHYWGQGTTVTVSS

SEQ ID NO: 415 - DNA, 339 bp, synthetic construct
  misc_feature 1..339: note = Synthetic
  source 1..339: mol_type = other DNA
gaagtgcgcttacagcaatccggcgcagaattggtgaaacccggagctagtgtaaagctgtcttgtaccgccagcggctttaacatcaaagacacgtacatgcactgggttaaacagcggccagagcaggggctcgagtggattggatggatagacccggagaacggaaacactaagtatgaccctaagttccagggtaaggctacgatcacgacagataccagcagcaataccgcctacctgcaactttcttccctgacctcagaagattcggccgtctactattgcattaggtccgggcattattgggggcagggcactaccgtcactgtgagtagc

SEQ ID NO: 416 - protein, 10 aa, synthetic construct
  REGION 1..10: note = Synthetic
QSVDSDGDSY

SEQ ID NO: 417 - skipped

SEQ ID NO: 418 - protein, 9 aa, synthetic construct
  REGION 1..9: note = Synthetic
QQSHEYPFT

SEQ ID NO: 419 - protein, 111 aa, synthetic construct
  REGION 1..111: note = Synthetic
DIQLTQSPSSLSASVGDRVTITCKASQSVDSDGDSYMNWYQQKPGKAPKLLIYGASNLESGVPSRFSGSGSGTDFTLTISSLQPEDFATYYCQQSHEYPFTFGQGTKLEIK

SEQ ID NO: 420 - DNA, 333 bp, synthetic construct
  misc_feature 1..333: note = Synthetic
  source 1..333: mol_type = other DNA
gacattcagctgacccagtctcccagctccctgtctgcaagtgtgggcgatcgggttaccatcacatgcaaggcaagccaatccgtggactccgacggagatagctacatgaactggtatcagcagaaacctggtaaggcgcccaagttactgatctatggggccagcaatttggaatctggagtcccaagccgcttcagtggctcagggtcaggcactgattttacgctcactatttcctcccttcaaccggaggacttcgccacatattactgtcagcagagtcacgagtacccttttaccttcggtcagggaaccaaactcgagataaaa

SEQ ID NO: 421 - protein, 8 aa, synthetic construct
  REGION 1..8: note = Synthetic
GFNIKDTY

SEQ ID NO: 422 - protein, 8 aa, synthetic construct
  REGION 1..8: note = Synthetic
IDPENGNT

SEQ ID NO: 423 - protein, 6 aa, synthetic construct
  REGION 1..6: note = Synthetic
IRSGHY

SEQ ID NO: 424 - protein, 113 aa, synthetic construct; identical to SEQ ID NO: 414
  REGION 1..113: note = Synthetic

SEQ ID NO: 425 - DNA, 339 bp, synthetic construct; identical to SEQ ID NO: 415
  misc_feature 1..339: note = Synthetic
  source 1..339: mol_type = other DNA

SEQ ID NO: 426 - protein, 6 aa, synthetic construct
  REGION 1..6: note = Synthetic
ETISNF

SEQ ID NO: 427 - skipped

SEQ ID NO: 428 - protein, 9 aa, synthetic construct
  REGION 1..9: note = Synthetic
QQFYSVPWT

SEQ ID NO: 429 - protein, 107 aa, synthetic construct
  REGION 1..107: note = Synthetic
DIQMTQSPSSLSASVGDRVTITCRASETISNFLNWYQQKPGKAPKLLIYTTSSLQRGVPSRFSGSGSGTDFTLTISSLQPEDFATYYCQQFYSVPWTFGGGTKVEIK

SEQ ID NO: 430 - DNA, 321 bp, synthetic construct
  misc_feature 1..321: note = Synthetic
  source 1..321: mol_type = other DNA
gatattcaaatgactcagtctccatcctccttatcagccagtgtgggcgaccgcgtaaccataacatgtcgagcttccgagacgatcagcaactttctcaactggtatcagcagaagcctggaaaggccccaaaattgctgatctataccacctcaagccttcagcgtggtgtccccagtcggttctctggcagcggcagtggtacagactttactctgaccatcagctccctgcaacccgaggatttcgcaacttactactgccagcagttttactccgtgccttggacattcgggggagggacgaaggttgaaataaag

SEQ ID NO: 431 - protein, 8 aa, synthetic construct
  REGION 1..8: note = Synthetic
GFPFGNYL

SEQ ID NO: 432 - protein, 8 aa, synthetic construct
  REGION 1..8: note = Synthetic
ISGGGVST

SEQ ID NO: 433 - protein, 12 aa, synthetic construct
  REGION 1..12: note = Synthetic
ARGPSSWPAFDV

SEQ ID NO: 434 - protein, 119 aa, synthetic construct
  REGION 1..119: note = Synthetic
EVQLLESGGGLVQPGGSLRLSCAASGFPFGNYLMNWVRQAPGKGLEWVSVISGGGVSTYYADSVKGRFTISRDNSKNTLYLQMNSLRAEDTAVYYCARGPSSWPAFDVWGQGTLVTVSS

SEQ ID NO: 435 - DNA, 357 bp, synthetic construct
  misc_feature 1..357: note = Synthetic
  source 1..357: mol_type = other DNA
gaagtgcagcttctggagtctggaggcggattggtgcagcccggaggatcactgaggttaagctgtgccgcctctgggttccccttcggcaattatctaatgaactgggttcgacaggccccagggaaaggcctcgaatgggtatccgtcattagtggcggcggggtgagtacatattacgcagacagcgtcaagggccgctttaccatctcccgggataacagcaagaacacactgtacctccagatgaatagtctgcgtgccgaggacactgctgtctactattgcgctaggggtccttcaagctggccggcatttgatgtttgggggcaaggtacccttgtgacggtgtcgtcc

SEQ ID NO: 436 - protein, 6 aa, synthetic construct
  REGION 1..6: note = Synthetic
GDIRNY

SEQ ID NO: 437 - skipped

SEQ ID NO: 438 - protein, 9 aa, synthetic construct
  REGION 1..9: note = Synthetic
QHHYGTPPT

SEQ ID NO: 439 - protein, 107 aa, synthetic construct
  REGION 1..107: note = Synthetic
DIQMTQSPASLSASVGETVTITCRASGDIRNYLIWYQQKQGKSPQVLVYNAKTLADGVPSRFSGSGSGTQFSLKINSLQPEDFGSYYCQHHYGTPPTFGGGTKLEIK

SEQ ID NO: 440 - DNA, 321 bp, synthetic construct
  misc_feature 1..321: note = Synthetic
  source 1..321: mol_type = other DNA
gatattcagatgactcaaagccctgcgtccctgtctgcctctgtcggcgaaacggttaccataacatgccgcgcttcaggcgatatccggaactatctgatctggtaccagcagaagcaagggaagtcccctcaggtgcttgtgtataacgccaaaaccctcgcagacggggtaccaagtcgattttccggatcaggaagcggcacccagttctccttaaagatcaatagtttgcagcccgaggacttcggcagctattactgtcagcaccactacggtacaccacccacttttggtgggggaacaaaactggagataaag

SEQ ID NO: 441 - protein, 8 aa, synthetic construct
  REGION 1..8: note = Synthetic
GFNIKDYY

SEQ ID NO: 442 - protein, 8 aa, synthetic construct
  REGION 1..8: note = Synthetic
IDPENGDT

SEQ ID NO: 443 - protein, 6 aa, synthetic construct
  REGION 1..6: note = Synthetic
NTGFDY

SEQ ID NO: 444 - protein, 113 aa, synthetic construct
  REGION 1..113: note = Synthetic
QAYLQQSGAELVRSGASVKLSCTASGFNIKDYYMHWVKQRPEQGLEWIGWIDPENGDTEYAPKFQGKATMTADTSSNTAYLQLSSLTSEDTAVYYCNTGFDYWGQGTTLTVSS

SEQ ID NO: 445 - DNA, 339 bp, synthetic construct
  misc_feature 1..339: note = Synthetic
  source 1..339: mol_type = other DNA
caggcttatctccagcaatcaggcgctgagcttgtgcggagcggagcaagtgttaagctgagctgcaccgcctccggatttaacataaaggactattacatgcactgggtcaagcagaggcctgagcaggggttagaatggatcgggtggattgatcccgaaaatggagacacggaatatgctccgaaattccagggcaaagccacaatgactgcagacacatccagcaatactgcctacttgcaactctccagtctgacctcagaggatacagccgtgtactattgtaacaccgggttcgattactggggtcagggcactaccctgacagtgtcttcg

SEQ ID NO: 446 - protein, 10 aa, synthetic construct
  REGION 1..10: note = Synthetic
QSVDSDGDSY

SEQ ID NO: 447 - skipped

SEQ ID NO: 448 - protein, 9 aa, synthetic construct
  REGION 1..9: note = Synthetic
QQSHEYPFT

SEQ ID NO: 449 - protein, 111 aa, synthetic construct; identical to SEQ ID NO: 419
  REGION 1..111: note = Synthetic

SEQ ID NO: 450 - DNA, 333 bp, synthetic construct; identical to SEQ ID NO: 420
  misc_feature 1..333: note = Synthetic
  source 1..333: mol_type = other DNA

SEQ ID NO: 451 - protein, 8 aa, synthetic construct
  REGION 1..8: note = Synthetic
GYTFTNYG

SEQ ID NO: 452 - protein, 8 aa, synthetic construct
  REGION 1..8: note = Synthetic
IDTYTGEP

SEQ ID NO: 453 - protein, 9 aa, synthetic construct
  REGION 1..9: note = Synthetic
SRQLGLLDY

SEQ ID NO: 454 - protein, 116 aa, synthetic construct
  REGION 1..116: note = Synthetic
QVQLQQSGPELKKPGETVKISCKASGYTFTNYGMNWVKQAPGKGLKWMGWIDTYTGEPTYADDFKGRFAFSLETSASTAYLQINNLKNEDTATYFCSRQLGLLDYWGQGTTLTVSS

SEQ ID NO: 455 - DNA, 348 bp, synthetic construct
  misc_feature 1..348: note = Synthetic
  source 1..348: mol_type = other DNA
caggtccagcttcagcaatccggccctgaactcaaaaagcccggagagacagttaagatcagctgcaaagcctccgggtatacattcaccaactatgggatgaactgggtgaagcaagctccgggtaaaggcctgaagtggatggggtggattgacacttataccggagagccaacttacgccgatgatttcaaaggcaggtttgctttctctctagagacaagcgccagtacggcctacctgcagataaataacctcaagaatgaagacaccgcgacctacttttgctcacggcagttgggcttactggactactggggccagggaaccacactgactgtgagtagc

SEQ ID NO: 456 - protein, 10 aa, synthetic construct
  REGION 1..10: note = Synthetic
QSVDSDGDSY

SEQ ID NO: 457 - skipped

SEQ ID NO: 458 - protein, 9 aa, synthetic construct
  REGION 1..9: note = Synthetic
QQYHSHPYT

SEQ ID NO: 459 - protein, 111 aa, synthetic construct
  REGION 1..111: note = Synthetic
DIQLTQSPSSLSASVGDRVTITCKASQSVDSDGDSYMNWYQQKPGKAPKLLIYGASNLESGVPSRFSGSGSGTDFTLTISSLQPEDFATYYCQQYHSHPYTFGQGTKLEIK

SEQ ID NO: 460 - DNA, 333 bp, synthetic construct
  misc_feature 1..333: note = Synthetic
  source 1..333: mol_type = other DNA
gatatccaactgactcagagtcctagcagccttagcgcatcagtgggtgatcgcgttaccatcacatgcaaagcgagtcagagcgtggattcagacggggactcttacatgaactggtatcagcagaagcccgggaaagccccaaagttgctcatatacggcgctagtaatttagagtcaggggtcccctctcggttctccggatccggctctggcaccgacttcacacttaccatttccagcctgcagcctgaagactttgccacttattattgtcagcagtaccactcccacccgtacacatttggacaaggtacgaagctggagataaag

SEQ ID NO: 461 - protein, 8 aa, synthetic construct
  REGION 1..8: note = Synthetic
GFNIKDTY

SEQ ID NO: 462 - protein, 8 aa, synthetic construct
  REGION 1..8: note = Synthetic
IDPENGNT

SEQ ID NO: 463 - protein, 6 aa, synthetic construct
  REGION 1..6: note = Synthetic
IRSGHY

SEQ ID NO: 464 - protein, 113 aa, synthetic construct; identical to SEQ ID NO: 414
  REGION 1..113: note = Synthetic

SEQ ID NO: 465 - DNA, 339 bp, synthetic construct; identical to SEQ ID NO: 415
  misc_feature 1..339: note = Synthetic
  source 1..339: mol_type = other DNA

SEQ ID NO: 466 - protein, 10 aa, synthetic construct
  REGION 1..10: note = Synthetic
QSVDSDGDSY

SEQ ID NO: 467 - skipped

SEQ ID NO: 468 - protein, 9 aa, synthetic construct
  REGION 1..9: note = Synthetic
QQYHSHPYT

SEQ ID NO: 469 - protein, 111 aa, synthetic construct; identical to SEQ ID NO: 459
  REGION 1..111: note = Synthetic

SEQ ID NO: 470 - DNA, 333 bp, synthetic construct; identical to SEQ ID NO: 460
  misc_feature 1..333: note = Synthetic
  source 1..333: mol_type = other DNA

SEQ ID NO: 471 - protein, 8 aa, synthetic construct
  REGION 1..8: note = Synthetic
GFTFTDYY

SEQ ID NO: 472 - protein, 10 aa, synthetic construct
  REGION 1..10: note = Synthetic
IRNKANGYTT

SEQ ID NO: 473 - protein, 11 aa, synthetic construct
  REGION 1..11: note = Synthetic
ARDDYDDYFAY

SEQ ID NO: 474 - protein, 120 aa, synthetic construct
  REGION 1..120: note = Synthetic
EVLLVESGGGLVQPGGSLRLSCATSGFTFTDYYMSWVRQPPGKALEWLGFIRNKANGYTTEYSASVKGRFTISRDNSQSILYLQMNTLRGEDSATYYCARDDYDDYFAYWGQGTTLTVSS

SEQ ID NO: 475 - DNA, 360 bp, synthetic construct
  misc_feature 1..360: note = Synthetic
  source 1..360: mol_type = other DNA
gaagtgcttctggtggaatccggcgggggtttagttcagcctggagggtccctcaggctgagctgtgctacatcaggattcacctttaccgactactacatgagttgggtacgtcagcccccaggcaaggcactggagtggttggggttcattcgaaacaaagccaatggctataccaccgagtacagtgcttccgtcaaggggcggttcacaatcagccgcgataatagccagtcgatcctttatctgcaaatgaacactctccggggcgaggacagcgcaacatactattgcgccagggacgactatgatgattactttgcctactggggacagggcactacgctaactgtgtcttct

SEQ ID NO: 476 - protein, 6 aa, synthetic construct
  REGION 1..6: note = Synthetic
ETISNF

SEQ ID NO: 477 - skipped

SEQ ID NO: 478 - protein, 9 aa, synthetic construct
  REGION 1..9: note = Synthetic
QQFYSVPWT

SEQ ID NO: 479 - protein, 107 aa, synthetic construct; identical to SEQ ID NO: 429
  REGION 1..107: note = Synthetic

SEQ ID NO: 480 - DNA, 321 bp, synthetic construct; identical to SEQ ID NO: 430
  misc_feature 1..321: note = Synthetic
  source 1..321: mol_type = other DNA

SEQ ID NO: 481 - protein, 8 aa, synthetic construct
  REGION 1..8: note = Synthetic
GFNIKDTY

SEQ ID NO: 482 - protein, 8 aa, synthetic construct
  REGION 1..8: note = Synthetic
IDPENGNT

SEQ ID NO: 483 - protein, 6 aa, synthetic construct
  REGION 1..6: note = Synthetic
IRSGHY

SEQ ID NO: 484 - protein, 113 aa, synthetic construct; identical to SEQ ID NO: 414
  REGION 1..113: note = Synthetic

SEQ ID NO: 485 - DNA, 339 bp, synthetic construct; identical to SEQ ID NO: 415
  misc_feature 1..339: note = Synthetic
  source 1..339: mol_type = other DNA

SEQ ID NO: 486 - protein, 6 aa, synthetic construct
  REGION 1..6: note = Synthetic
ETISNF

SEQ ID NO: 487 - skipped

SEQ ID NO: 488 - protein, 9 aa, synthetic construct
  REGION 1..9: note = Synthetic
QQSYSVPWT

SEQ ID NO: 489 - protein, 106 aa, synthetic construct
  REGION 1..106: note = Synthetic
DIQMTQSPSSLSASVGDRVTITCRASETISNFLNWYQQKPGKAPKLLIYTTSSLQRGVPSRFSGSGSGTDFTLTISSLQPEDFATYYCQQSYSVPWTFGGTKVEIK

SEQ ID NO: 490 - DNA, 318 bp, synthetic construct
  misc_feature 1..318: note = Synthetic
  source 1..318: mol_type = other DNA
gatattcagatgacacagtccccaagctctttaagcgcctctgtaggtgaccgggtgaccatcacttgccgtgcaagtgagactatatcaaacttcctgaactggtaccaacagaagcccggcaaggcccctaagttgctgatctataccacatcaagtcttcagcgcggagtgccctctcgattcagtgggagcggaagcggcaccgattttactctgaccatttccagcctccagcctgaggactttgctacgtactattgtcaacagtcctactccgtcccatggacattcggcgggacaaaagttgaaatcaaa

SEQ ID NO: 491 - protein, 8 aa, synthetic construct
  REGION 1..8: note = Synthetic
GFNIKDYY

SEQ ID NO: 492 - protein, 8 aa, synthetic construct
  REGION 1..8: note = Synthetic
IDPENGDT

SEQ ID NO: 493 - protein, 6 aa, synthetic construct
  REGION 1..6: note = Synthetic
NTGFDY

SEQ ID NO: 494 - protein, 113 aa, synthetic construct; identical to SEQ ID NO: 444
  REGION 1..113: note = Synthetic

SEQ ID NO: 495 - DNA, 339 bp, synthetic construct; identical to SEQ ID NO: 445
  misc_feature 1..339: note = Synthetic
  source 1..339: mol_type = other DNA

SEQ ID NO: 496 - protein, 10 aa, synthetic construct
  REGION 1..10: note = Synthetic
TSNIGSGNNY

SEQ ID NO: 497 - skipped

SEQ ID NO: 498 - protein, 9 aa, synthetic construct
  REGION 1..9: note = Synthetic
QQYHTYPFT

SEQ ID NO: 499 - protein, 111 aa, synthetic construct
  REGION 1..111: note = Synthetic
DIQLTQSPSSLSASVGDRVTITCKASTSNIGSGNNYMNWYQQKPGKAPKLLIYGASNLESGVPSRFSGSGSGTDFTLTISSLQPEDFATYYCQQYHTYPFTFGQGTKLEIK

SEQ ID NO: 500 - DNA, 333 bp, synthetic construct
  misc_feature 1..333: note = Synthetic
  source 1..333: mol_type = other DNA
gatattcaactcacccagtccccttctagcctctcagcttccgtgggggatcgggtcaccattacctgtaaagccagcacctccaacataggcagtgggaacaactacatgaactggtaccagcagaaaccaggaaaggcgcctaagcttctgatctatggagccagcaatttagaatctggcgttcccagccgcttttctggtagtggtagtgggacagacttcacattgactatctcctcactgcagcccgaggacttcgcaacatattactgccagcagtaccacacgtatccgtttactttcggacaaggcactaagctggagatcaaa

SEQ ID NO: 501 - protein, 8 aa, synthetic construct
  REGION 1..8: note = Synthetic
GYTFTSYD

SEQ ID NO: 502 - protein, 8 aa, synthetic construct
  REGION 1..8: note = Synthetic
IFPGDGTS

SEQ ID NO: 503 - protein, 7 aa, synthetic construct
  REGION 1..7: note = Synthetic
ARRAGNY

SEQ ID NO: 504 - protein, 114 aa, synthetic construct
  REGION 1..114: note = Synthetic
EVQLVQSGAEVKKPGASVKLSCKASGYTFTSYDINWVRQAPGQGLEWIGWIFPGDGTSKYAQKFQGRATLTTDKSTSTAYMELSSLRSEDTAVYYCARRAGNYWGQGTTLTVSS

SEQ ID NO: 505 - DNA, 342 bp, synthetic construct
  misc_feature 1..342: note = Synthetic
  source 1..342: mol_type = other DNA
gaagtgcagctcgtacagtccggggctgaggttaagaaacccggtgcatcggtgaaattgagctgcaaggcctctggctacaccttcacaagctatgatattaactgggtccgtcaagcaccagggcagggcctggaatggatagggtggatctttcctggcgacggaaccagtaagtacgctcagaaattccagggccgagccacacttactaccgataagagcacaagcacggcctatatggagctgagttctttacgctccgaggacaccgctgtctactattgtgccaggcgggcaggcaattactggggacaaggaactacactgactgtgtcatcc

SEQ ID NO: 506 - protein, 6 aa, synthetic construct
  REGION 1..6: note = Synthetic
QDVGTA

SEQ ID NO: 507 - skipped

SEQ ID NO: 508 - protein, 9 aa, synthetic construct
  REGION 1..9: note = Synthetic
QQHYSPPYT

SEQ ID NO: 509 - protein, 107 aa, synthetic construct
  REGION 1..107: note = Synthetic
DVVMTQSHKFMSTSVGDRVSITCKASQDVGTAVAWYQQKPGQSPKALIYWASTRHTGVPDRFTGSGSGTDFTFTISSVQAEDLAVYYCQQHYSPPYTFGGGTKLEMK

SEQ ID NO: 510 - DNA, 321 bp, synthetic construct
  misc_feature 1..321: note = Synthetic
  source 1..321: mol_type = other DNA
gacgttgtgatgacccagtcacacaagttcatgtccacttccgtcggcgaccgggtttccataacatgcaaggcttcccaggatgtgggcacagcagtggcttggtatcaacagaaacccgggcagtctcctaaggccctcatctattgggccagtactcgacataccggagtcccagatcgctttaccggatctggtagcgggaccgatttcactttcacaattagcagcgtacaggcggaagacctggccgtgtattactgtcagcaacactacagtccgccctacacgtttggcggaggtacaaaattggagatgaaa

SEQ ID NO: 511 - protein, 8 aa, synthetic construct
  REGION 1..8: note = Synthetic
GFNIKDTY

SEQ ID NO: 512 - protein, 8 aa, synthetic construct
  REGION 1..8: note = Synthetic
IDPENGNT

SEQ ID NO: 513 - protein, 6 aa, synthetic construct
  REGION 1..6: note = Synthetic
IRSGHY

SEQ ID NO: 514 - protein, 113 aa, synthetic construct; identical to SEQ ID NO: 414
  REGION 1..113: note = Synthetic

SEQ ID NO: 515 - DNA, 339 bp, synthetic construct; identical to SEQ ID NO: 415
  misc_feature 1..339: note = Synthetic
  source 1..339: mol_type = other DNA

SEQ ID NO: 516 - protein, 6 aa, synthetic construct
  REGION 1..6: note = Synthetic
QDVGTA

SEQ ID NO: 517 - skipped

SEQ ID NO: 518 - protein, 10 aa, synthetic construct
  REGION 1..10: note = Synthetic
QQYNSYPQYT

SEQ ID NO: 519 - protein, 108 aa, synthetic construct
  REGION 1..108: note = Synthetic
DIVMSQSHKFMSTSVGDRVSITCKASQDVGTAVAWYQQKPGQSPKLLIYWASTRHTGVPDRFTGSGSGTDFTLTISNVQSEDLAEYFCQQYNSYPQYTFGGGTKLEIK

SEQ ID NO: 520 - DNA, 324 bp, synthetic construct
  misc_feature 1..324: note = Synthetic
  source 1..324: mol_type = other DNA
gatattgtgatgtcccaatctcataagttcatgtcaaccagcgtcggggaccgcgtaagcataacatgcaaagcctctcaggacgttggcacagcagtggcgtggtatcaacagaagcctgggcagtcccccaaactgcttatctattgggccagtacgcggcacacaggagtgccagatcgatttactggcagcgggagtggaactgattttactctgaccattagcaatgtccagtccgaggacctcgctgaatacttctgtcagcagtacaactcctacccgcagtataccttcggtggtggcaccaagttggagatcaaa

SEQ ID NO: 521 - protein, 9 aa, synthetic construct
  REGION 1..9: note = Synthetic
GDSITSDYA

SEQ ID NO: 522 - protein, 7 aa, synthetic construct
  REGION 1..7: note = Synthetic
ISYSGNT

SEQ ID NO: 523 - protein, 10 aa, synthetic construct
  REGION 1..10: note = Synthetic
VRGMLTAFAY

SEQ ID NO: 524 - protein, 117 aa, synthetic construct
  REGION 1..117: note = Synthetic
QMQLQQSGPGLVKPSQSLSLTCTVTGDSITSDYAWNWIRQFPGSTLEWMGYISYSGNTAYNPSLKSRISITRDTSNNQFFLQLNSVTTEDTATYYCVRGMLTAFAYWGQGTLVTVSA

SEQ ID NO: 525 - DNA, 351 bp, synthetic construct
  misc_feature 1..351: note = Synthetic
  source 1..351: mol_type = other DNA
cagatgcagctccaacaatcaggacctggtctggtaaaaccctctcagagtctttcgttgacctgtacagtcaccggcgatagcattacatccgactacgcctggaattggattaggcagttcccaggaagcacactggaatggatggggtatatcagttatagcggcaataccgcatacaacccgtctctgaagtcccggatatccatcacccgcgatacctccaacaaccagtttttcctgcagctcaatagcgttacaactgaggacacggccacctactactgcgtgcgagggatgttaactgcctttgcttattggggccaggggactctagtgactgtgtcagct

SEQ ID NO: 526 - protein, 6 aa, synthetic construct
  REGION 1..6: note = Synthetic
ETISNF

SEQ ID NO: 527 - skipped

SEQ ID NO: 528 - protein, 8 aa, synthetic construct
  REGION 1..8: note = Synthetic
QQSSVPWT

SEQ ID NO: 529 - protein, 106 aa, synthetic construct
  REGION 1..106: note = Synthetic
DIQMTQSPSSLSASVGDRVTITCRASETISNFLNWYQQKPGKAPKLLIYTTSSLQRGVPSRFSGSGSGTDFTLTISSLQPEDFATYYCQQSSVPWTFGGGTKVEIK

SEQ ID NO: 530 - DNA, 318 bp, synthetic construct
  misc_feature 1..318: note = Synthetic
  source 1..318: mol_type = other DNA
gatattcagatgacacagtcaccatctagtcttagcgcaagcgttggcgatcgtgtcactatcacatgtcgcgcctccgaaaccatctccaatttcctcaactggtaccagcagaaacctggcaaggccccaaagttgctgatctataccactagtagcttacagcgaggagtaccttcccggttttctggtagtgggtccggaaccgacttcaccctgacaataagctccctgcaacccgaggacttcgctacgtattactgccagcaatcttcagtgccctggacctttggtgggggcactaaggtggagattaaa

SEQ ID NO: 531 - protein, 9 aa, synthetic construct
  REGION 1..9: note = Synthetic
GHSITSDCA

SEQ ID NO: 532 - protein, 7 aa, synthetic construct
  REGION 1..7: note = Synthetic
ISYSGTT

SEQ ID NO: 533 - protein, 12 aa, synthetic construct
  REGION 1..12: note = Synthetic
ARGLRRDWYFDV

SEQ ID NO: 534 - protein, 119 aa, synthetic construct
  REGION 1..119: note = Synthetic
EVKLEESGPGLVKPSQSLSLTCTVTGHSITSDCAWNWIRQFPGNKLEWMGYISYSGTTSYNPSLKSRISITRDTSKNQFFLQLNSVTTEDTATYYCARGLRRDWYFDVWGAGTTVTVSS

SEQ ID NO: 535 - DNA, 357 bp, synthetic construct
  misc_feature 1..357: note = Synthetic
  source 1..357: mol_type = other DNA
gaagttaaattagaagaatctggtcctggtttagttaaaccttctcaatctttatctttaacttgtactgttactggtcattctattacttctgattgtgcttggaattggattcgtcaatttcctggtaataaattagaatggatgggttatatttcttattctggtactacttcttataatccttctttaaaatctcgtatttctattactcgtgatacttctaaaaatcaattttttttacaattaaattctgttactactgaagatactgctacttattattgtgctcgtggtttacgtcgtgattggtattttgatgtttggggtgctggtactactgttactgtttcttct

SEQ ID NO: 536 - protein, 6 aa, synthetic construct
  REGION 1..6: note = Synthetic
QNVGKN

SEQ ID NO: 537 - skipped

SEQ ID NO: 538 - protein, 9 aa, synthetic construct
  REGION 1..9: note = Synthetic
QQYSSYPYT

SEQ ID NO: 539 - protein, 107 aa, synthetic construct
  REGION 1..107: note = Synthetic
DILLTQSQKFMSTSVGDRVSVTCKASQNVGKNVAWYQQKPGQSPKALIYSASYRYSGVPDRFTGSGSGTDFTLTISNVQSEDLAEYFCQQYSSYPYTFGGGTKLEIK

SEQ ID NO: 540 - DNA, 321 bp, synthetic construct
  misc_feature 1..321: note = Synthetic
  source 1..321: mol_type = other DNA
gatattttattaactcaatctcaaaaatttatgtctacttctgttggtgatcgtgtttctgttacttgtaaagcttctcaaaatgttggtaaaaatgttgcttggtatcaacaaaaacctggtcaatctcctaaagctttaatttattctgcttcttatcgttattctggtgttcctgatcgttttactggttctggttctggtactgattttactttaactatttctaatgttcaatctgaagatttagctgaatatttttgtcaacaatattcttcttatccttatacttttggtggtggtactaaattagaaattaaa

SEQ ID NO: 541 - protein, 8 aa, synthetic construct
  REGION 1..8: note = Synthetic
GFPFGNYL

SEQ ID NO: 542 - protein, 8 aa, synthetic construct
  REGION 1..8: note = Synthetic
ISGGGVST

SEQ ID NO: 543 - protein, 12 aa, synthetic construct
  REGION 1..12: note = Synthetic
ARGPSSWPAFDV

SEQ ID NO: 544 - protein, 119 aa, synthetic construct; identical to SEQ ID NO: 434
  REGION 1..119: note = Synthetic

SEQ ID NO: 545 - DNA, 357 bp, synthetic construct
  misc_feature 1..357: note = Synthetic
  source 1..357: mol_type = other DNA
gaagttcaattattagaatctggtggtggtttagttcaacctggtggttctttacgtttatcttgtgctgcttctggttttccttttggtaattatttaatgaattgggttcgtcaagctcctggtaaaggtttagaatgggtttctgttatttctggtggtggtgtttctacttattatgctgattctgttaaaggtcgttttactatttctcgtgataattctaaaaatactttatatttacaaatgaattctttacgtgctgaagatactgctgtttattattgtgctcgtggtccttcttcttggcctgcttttgatgtttggggtcaaggtactttagttactgtttcttct

SEQ ID NO: 546 - protein, 6 aa, synthetic construct
  REGION 1..6: note = Synthetic
ETISNF

SEQ ID NO: 547 - skipped

SEQ ID NO: 548 - protein, 9 aa, synthetic construct
  REGION 1..9: note = Synthetic
QQSYSVPWT

SEQ ID NO: 549 - protein, 107 aa, synthetic construct
  REGION 1..107: note = Synthetic
DIQMTQSPSSLSASVGDRVTITCRASETISNFLNWYQQKPGKAPKLLIYTTSSLQRGVPSRFSGSGSGTDFTLTISSLQPEDFATYYCQQSYSVPWTFGGGTKVEIK

SEQ ID NO: 550 - DNA, 321 bp, synthetic construct
  misc_feature 1..321: note = Synthetic
  source 1..321: mol_type = other DNA
gatattcaaatgactcaatctccttcttctttatctgcttctgttggtgatcgtgttactattacttgtcgtgcttctgaaactatttctaattttttaaattggtatcaacaaaaacctggtaaagctcctaaattattaatttatactacttcttctttacaacgtggtgttccttctcgtttttctggttctggttctggtactgattttactttaactatttcttctttacaacctgaagattttgctacttattattgtcaacaatcttattctgttccttggacttttggtggtggtactaaagttgaaattaaa

SEQ ID NO: 551 - protein, 9 aa, synthetic construct
  REGION 1..9: note = Synthetic
GDSITSDYA

SEQ ID NO: 552 - protein, 7 aa, synthetic construct
  REGION 1..7: note = Synthetic
ISYSGNT

SEQ ID NO: 553 - protein, 10 aa, synthetic construct
  REGION 1..10: note = Synthetic
VRGMLTAFAY

SEQ ID NO: 554 - protein, 117 aa, synthetic construct; identical to SEQ ID NO: 524
  REGION 1..117: note = Synthetic

SEQ ID NO: 555 - DNA, 351 bp, synthetic construct
  misc_feature 1..351: note = Synthetic
  source 1..351: mol_type = other DNA
caaatgcaattacaacaatctggtcctggtttagttaaaccttctcaatctttatctttaacttgtactgttactggtgattctattacttctgattatgcttggaattggattcgtcaatttcctggttctactttagaatggatgggttatatttcttattctggtaatactgcttataatccttctttaaaatctcgtatttctattactcgtgatacttctaataatcaattttttttacaattaaattctgttactactgaagatactgctacttattattgtgttcgtggtatgttaactgcttttgcttattggggtcaaggtactttagttactgtttctgct

SEQ ID NO: 556 - protein, 11 aa, synthetic construct
  REGION 1..11: note = Synthetic
QSLLDSDGKTY

SEQ ID NO: 557 - skipped

SEQ ID NO: 558 - protein, 9 aa, synthetic construct
  REGION 1..9: note = Synthetic
WQGTHFPQT

SEQ ID NO: 559 - protein, 112 aa, synthetic construct
  REGION 1..112: note = Synthetic
DIVMTQTPLTLSVTIGQPASISCKSSQSLLDSDGKTYLNWLLQRPGQSPKRLIYLVSKLDSGVPDRFTGSGSGTDFTLKISRVEAEDLGVYYCWQGTHFPQTFGGGTKLEIK

SEQ ID NO: 560 - DNA, 336 bp, synthetic construct
  misc_feature 1..336: note = Synthetic
  source 1..336: mol_type = other DNA
gatattgttatgactcaaactcctttaactttatctgttactattggtcaacctgcttctatttcttgtaaatcttctcaatctttattagattctgatggtaaaacttatttaaattggttattacaacgtcctggtcaatctcctaaacgtttaatttatttagtttctaaattagattctggtgttcctgatcgttttactggttctggttctggtactgattttactttaaaaatttctcgtgttgaagctgaagatttaggtgtttattattgttggcaaggtactcattttcctcaaacttttggtggtggtactaaattagaaattaaa

SEQ ID NO: 561 - protein, 8 aa, synthetic construct
  REGION 1..8: note = Synthetic
GFTFSSFG

SEQ ID NO: 562 - protein, 8 aa, synthetic construct
  REGION 1..8: note = Synthetic
ISSGSNTI

SEQ ID NO: 563 - protein, 5 aa, synthetic construct
  REGION 1..5: note = Synthetic
TRGGV

SEQ ID NO: 564 - protein, 112 aa, synthetic construct
  REGION 1..112: note = Synthetic
EVQLVESGGGLVQPGGSRKLSCAASGFTFSSFGMHWVRQAPEKGLEWVAYISSGSNTIYYADTLKGRFTISRDNAKNTLYLQMSRLKSEDTAMYYCTRGGVFGQGTLVTVSA

SEQ ID NO: 565 - DNA, 336 bp, synthetic construct
  misc_feature 1..336: note = Synthetic
  source 1..336: mol_type = other DNA
gaagttcaattagttgaatctggtggtggtttagttcaacctggtggttctcgtaaattatcttgtgctgcttctggttttactttttcttcttttggtatgcattgggttcgtcaagctcctgaaaaaggtttagaatgggttgcttatatttcttctggttctaatactatttattatgctgatactttaaaaggtcgttttactatttctcgtgataatgctaaaaatactttatatttacaaatgtctcgtttaaaatctgaagatactgctatgtattattgtactcgtggtggtgtttttggtcaaggtactttagttactgtttctgct

SEQ ID NO: 566 - protein, 11 aa, synthetic construct
  REGION 1..11: note = Synthetic
QSLLDSDGKTY

SEQ ID NO: 567 - skipped

SEQ ID NO: 568 - protein, 9 aa, synthetic construct
  REGION 1..9: note = Synthetic
WQGTHFPHT

SEQ ID NO: 569 - protein, 112 aa, synthetic construct
  REGION 1..112: note = Synthetic
DIQMTQTPLTLSVTIGQPASISCKSSQSLLDSDGKTYLNWLLQRPGQSPKRLIYLVSKLDSGVPDRFTGSGSGTDFTLKISRVEAEDLGVYYCWQGTHFPHTFGGGTKLEIK

SEQ ID NO: 570 - DNA, 336 bp, synthetic construct
  misc_feature 1..336: note = Synthetic
  source 1..336: mol_type = other DNA
gatattcaaatgactcaaactcctttaactttatctgttactattggtcaacctgcttctatttcttgtaaatcttctcaatctttattagattctgatggtaaaacttatttaaattggttattacaacgtcctggtcaatctcctaaacgtttaatttatttagtttctaaattagattctggtgttcctgatcgttttactggttctggttctggtactgattttactttaaaaatttctcgtgttgaagctgaagatttaggtgtttattattgttggcaaggtactcattttcctcatacttttggtggtggtactaaattagaaattaaa

SEQ ID NO: 571 - protein, 8 aa, synthetic construct
  REGION 1..8: note = Synthetic
GFTFTDYF

SEQ ID NO: 572 - protein, 10 aa, synthetic construct
  REGION 1..10: note = Synthetic
IRNKANGYTT

SEQ ID NO: 573 - protein, 15 aa, synthetic construct
  REGION 1..15: note = Synthetic
ARPSYYDYNGTWFAY

SEQ ID NO: 574 - protein, 124 aa, synthetic construct
  REGION 1..124: note = Synthetic
EVQLVESGGGLVQPGGSLRLSCATSGFTFTDYFLSWVRQPPGKALEWLGFIRNKANGYTTEYSASVKGRFTISRDNSQSILYLQMNTLRAEDSATYYCARPSYYDYNGTWFAYWGQGTLVTVSA

SEQ ID NO: 575 - DNA, 372 bp, synthetic construct
  misc_feature 1..372: note = Synthetic
  source 1..372: mol_type = other DNA
gaagttcaattagttgaatctggtggtggtttagttcaacctggtggttctttacgtttatcttgtgctacttctggttttacttttactgattattttttatcttgggttcgtcaacctcctggtaaagctttagaatggttaggttttattcgtaataaagctaatggttatactactgaatattctgcttctgttaaaggtcgttttactatttctcgtgataattctcaatctattttatatttacaaatgaatactttacgtgctgaagattctgctacttattattgtgctcgtccttcttattatgattataatggtacttggtttgcttattggggtcaaggtactttagttactgtttctgct

SEQ ID NO: 576 - protein, 6 aa, synthetic construct
  REGION 1..6: note = Synthetic
QDVSSA

SEQ ID NO: 577 - skipped

SEQ ID NO: 578 - protein, 9 aa, synthetic construct
  REGION 1..9: note = Synthetic
QQHYSPPWT

SEQ ID NO: 579 - protein, 107 aa, synthetic construct
  REGION 1..107: note = Synthetic
DIVMTQSHKFMSTSVGDRVSITCKASQDVSSAVAWYQQKPRQSPKLLIYSASYRYTGVPDRFTGSGSGTDFTFTISSVQAEDLAVYYCQQHYSPPWTFGGGTKLEMK

SEQ ID NO: 580 - DNA, 321 bp, synthetic construct
  misc_feature 1..321: note = Synthetic
  source 1..321: mol_type = other DNA
gatattgttatgactcaatctcataaatttatgtctacttctgttggtgatcgtgtttctattacttgtaaagcttctcaagatgtttcttctgctgttgcttggtatcaacaaaaacctcgtcaatctcctaaattattaatttattctgcttcttatcgttatactggtgttcctgatcgttttactggttctggttctggtactgattttacttttactatttcttctgttcaagctgaagatttagctgtttattattgtcaacaacattattctcctccttggacttttggtggtggtactaaattagaaatgaaa

SEQ ID NO: 581 - protein, 8 aa, synthetic construct
  REGION 1..8: note = Synthetic
GFAFSNYA

SEQ ID NO: 582 - protein, 8 aa, synthetic construct
  REGION 1..8: note = Synthetic
ISNGGGYT

SEQ ID NO: 583 - protein, 13 aa, synthetic construct
  REGION 1..13: note = Synthetic
ARHGYNWERWFAY

SEQ ID NO: 584 - protein, 120 aa, synthetic construct
  REGION 1..120: note = Synthetic
EVKIEESGGGLVKPGGSLKLSCAASGFAFSNYAMSWVRQTPEKRLEWVATISNGGGYTFYTDSVKGRFTISRDNAKNTLYLQMSSLRSEDSAMYYCARHGYNWERWFAYWGQGTLVTVSA

SEQ ID NO: 585 - DNA, 360 bp, synthetic construct
  misc_feature 1..360: note = Synthetic
  source 1..360: mol_type = other DNA
gaagttaaaattgaagaatctggtggtggtttagttaaacctggtggttctttaaaattatcttgtgctgcttctggttttgctttttctaattatgctatgtcttgggttcgtcaaactcctgaaaaacgtttagaatgggttgctactatttctaatggtggtggttatactttttatactgattctgttaaaggtcgttttactatttctcgtgataatgctaaaaatactttatatttacaaatgtcttctttacgttctgaagattctgctatgtattattgtgctcgtcatggttataattgggaacgttggtttgcttattggggtcaaggtactttagttactgtttctgct

SEQ ID NO: 586 - protein, 6 aa, synthetic construct
  REGION 1..6: note = Synthetic
QDVGTA

SEQ ID NO: 587 - skipped

SEQ ID NO: 588 - protein, 9 aa, synthetic construct
  REGION 1..9: note = Synthetic
QQHYSTPYT

SEQ ID NO: 589 - protein, 107 aa, synthetic construct
  REGION 1..107: note = Synthetic
DIVMTQSHKFMSTSVGDRVSITCKASQDVGTAVAWYQQKPGQSPKLLIYWASTRHTGVPDRFTGSGSGTDFTLTISSVQAEDLAVYYCQQHYSTPYTFGGGTKLEIK

SEQ ID NO: 590 - DNA, 321 bp, synthetic construct
  misc_feature 1..321: note = Synthetic
  source 1..321: mol_type = other DNA
gatattgttatgactcaatctcataaatttatgtctacttctgttggtgatcgtgtttctattacttgtaaagcttctcaagatgttggtactgctgttgcttggtatcaacaaaaacctggtcaatctcctaaattattaatttattgggcttctactcgtcatactggtgttcctgatcgttttactggttctggttctggtactgattttactttaactatttcttctgttcaagctgaagatttagctgtttattattgtcaacaacattattctactccttatacttttggtggtggtactaaattagaaattaaa

SEQ ID NO: 591 - protein, 8 aa, synthetic construct
  REGION 1..8: note = Synthetic
GFTFTDYY

SEQ ID NO: 592 - protein, 10 aa, synthetic construct
  REGION 1..10: note = Synthetic
IRNKANGYTT

SEQ ID NO: 593 - protein, 13 aa, synthetic construct
  REGION 1..13: note = Synthetic
ARDRGWLRGYFDV

SEQ ID NO: 594 - protein, 122 aa, synthetic construct
  REGION 1..122: note = Synthetic
EVQLVESGGGLVQPGGSLRLSCATSGFTFTDYYMIWVRQPPGKALEWLGFIRNKANGYTTEYSASVKGRFTISRDNSQSILYLQMNTLRAEDSATYYCARDRGWLRGYFDVWGAGTTVTVSS

SEQ ID NO: 595 - DNA, 366 bp, synthetic construct
  misc_feature 1..366: note = Synthetic
  source 1..366: mol_type = other DNA
gaagttcaattagttgaatctggtggtggtttagttcaacctggtggttctttacgtttatcttgtgctacttctggttttacttttactgattattatatgatttgggttcgtcaacctcctggtaaagctttagaatggttaggttttattcgtaataaagctaatggttatactactgaatattctgcttctgttaaaggtcgttttactatttctcgtgataattctcaatctattttatatttacaaatgaatactttacgtgctgaagattctgctacttattattgtgctcgtgatcgtggttggttacgtggttattttgatgtttggggtgctggtactactgttactgtttcttct

SEQ ID NO: 596 - protein, 11 aa, synthetic construct
  REGION 1..11: note = Synthetic
QSLVHSNGNTY

SEQ ID NO: 597 - skipped

SEQ ID NO: 598 - protein, 9 aa, synthetic construct
  REGION 1..9: note = Synthetic
SQSTHVPWT

SEQ ID NO: 599 - protein, 112 aa, synthetic construct
  REGION 1..112: note = Synthetic
DVVMTQTPLSLPVSLGDQASISCRSSQSLVHSNGNTYLHWYLQKPGQSPKLLIYKVSNRFSGVPDRFSGSGSGTDFTLKISRVEAEDLGVYFCSQSTHVPWTFGGGTKLEIK

SEQ ID NO: 600 - DNA, 336 bp, synthetic construct
  misc_feature 1..336: note = Synthetic
  source 1..336: mol_type = other DNA
gatgttgttatgactcaaactcctttatctttacctgtttctttaggtgatcaagcttctatttcttgtcgttcttctcaatctttagttcattctaatggtaatacttatttacattggtatttacaaaaacctggtcaatctcctaaattattaatttataaagtttctaatcgtttttctggtgttcctgatcgtttttctggttctggttctggtactgattttactttaaaaatttctcgtgttgaagctgaagatttaggtgtttatttttgttctcaatctactcatgttccttggacttttggtggtggtactaaattagaaattaaa

SEQ ID NO: 601 - protein, 9 aa, synthetic construct
  REGION 1..9: note = Synthetic
GYSITSDYA

SEQ ID NO: 602 - protein, 7 aa, synthetic construct
  REGION 1..7: note = Synthetic
ISYSGST

SEQ ID NO: 603 - protein, 12 aa, synthetic construct
  REGION 1..12: note = Synthetic
ASWGTTVGYFDY

SEQ ID NO: 604 - protein, 119 aa, synthetic construct
  REGION 1..119: note = Synthetic
EVQLQESGPGLVKPSQSLSLTCTVTGYSITSDYAWNWIRQFPGNKLEWMGYISYSGSTSYNPSLKSRISITRDTSKNQFFLQLNSVTTEDTATYYCASWGTTVGYFDYWGQGTTLTVSS

SEQ ID NO: 605 - DNA, 357 bp, synthetic construct
  misc_feature 1..357: note = Synthetic
  source 1..357: mol_type = other DNA
gaagttcaattacaagaatctggtcctggtttagttaaaccttctcaatctttatctttaacttgtactgttactggttattctattacttctgattatgcttggaattggattcgtcaatttcctggtaataaattagaatggatgggttatatttcttattctggttctacttcttataatccttctttaaaatctcgtatttctattactcgtgatacttctaaaaatcaattttttttacaattaaattctgttactactgaagatactgctacttattattgtgcttcttggggtactactgttggttattttgattattggggtcaaggtactactttaactgtttcttct

SEQ ID NO: 606 - protein, 11 aa, synthetic construct
  REGION 1..11: note = Synthetic
QSLLDSDGKTY

SEQ ID NO: 607 - skipped

SEQ ID NO: 608 - protein, 9 aa, synthetic construct
  REGION 1..9: note = Synthetic
WQGTHFPWT

SEQ ID NO: 609 - protein, 112 aa, synthetic construct
  REGION 1..112: note = Synthetic
DIVMTQTPLTLSVTIGQPASISCKSSQSLLDSDGKTYLNWLLQRPGQSPKRLIYLVSKLDSGVPDRFTGSGSGTDFTLKISRVEAEDLGVYYCWQGTHFPWTFGGGTKLEIK

SEQ ID NO: 610 - DNA, 336 bp, synthetic construct
  misc_feature 1..336: note = Synthetic
  source 1..336: mol_type = other DNA
gatattgttatgactcaaactcctttaactttatctgttactattggtcaacctgcttctatttcttgtaaatcttctcaatctttattagattctgatggtaaaacttatttaaattggttattacaacgtcctggtcaatctcctaaacgtttaatttatttagtttctaaattagattctggtgttcctgatcgttttactggttctggttctggtactgattttactttaaaaatttctcgtgttgaagctgaagatttaggtgtttattattgttggcaaggtactcattttccttggacttttggtggtggtactaaattagaaattaaa

SEQ ID NO: 611 - protein, 8 aa, synthetic construct
  REGION 1..8: note = Synthetic
GYTFTDYY

SEQ ID NO: 612 - protein, 8 aa, synthetic construct
  REGION 1..8: note = Synthetic
IYPGSGNT

SEQ ID NO: 613 - protein, 12 aa, synthetic construct
  REGION 1..12: note = Synthetic
ARERDGYYHFDY

SEQ ID NO: 614 - protein, 119 aa, synthetic construct
  REGION 1..119: note = Synthetic
QVQLQQSGPELVKPGASVKISCKASGYTFTDYYINWVKQKPGQGLEWIGWIYPGSGNTKYNEKFKGKATLTVDTSSSTAYMQLSSLTSEDTAVYFCARERDGYYHFDYWGQGTTLTVSS

SEQ ID NO: 615 - DNA, 357 bp, synthetic construct
  misc_feature 1..357: note = Synthetic
  source 1..357: mol_type = other DNA
caagttcaattacaacaatctggtcctgaattagttaaacctggtgcttctgttaaaatttcttgtaaagcttctggttatacttttactgattattatattaattgggttaaacaaaaacctggtcaaggtttagaatggattggttggatttatcctggttctggtaatactaaatataatgaaaaatttaaaggtaaagctactttaactgttgatacttcttcttctactgcttatatgcaattatcttctttaacttctgaagatactgctgtttatttttgtgctcgtgaacgtgatggttattatcattttgattattggggtcaaggtactactttaactgtttcttct

SEQ ID NO: 616 - protein, 11 aa, synthetic construct
  REGION 1..11: note = Synthetic
QSLVHSNGNTY

SEQ ID NO: 617 - skipped

SEQ ID NO: 618 - protein, 9 aa, synthetic construct
  REGION 1..9: note = Synthetic
QQYYSYPWT

SEQ ID NO: 619 - protein, 112 aa, synthetic construct
  REGION 1..112: note = Synthetic
DVVVTQTPLSLPVSLGDQASISCRSSQSLVHSNGNTYLHWYLQKPGQSPKLLIYKVSNRFSGVPDRFSGSGSGTDFTLTISNVQSEDLAEYFCQQYYSYPWTFGGGTKLEIK

SEQ ID NO: 620 - DNA, 336 bp, synthetic construct
  misc_feature 1..336: note = Synthetic
  source 1..336: mol_type = other DNA
gatgttgttgttactcaaactcctttatctttacctgtttctttaggtgatcaagcttctatttcttgtcgttcttctcaatctttagttcattctaatggtaatacttatttacattggtatttacaaaaacctggtcaatctcctaaattattaatttataaagtttctaatcgtttttctggtgttcctgatcgtttttctggttctggttctggtactgattttactttaactatttctaatgttcaatctgaagatttagctgaatatttttgtcaacaatattattcttatccttggacttttggtggtggtactaaattagaaattaaa

SEQ ID NO: 621 - protein, 8 aa, synthetic construct
  REGION 1..8: note = Synthetic
GFTFTDYY

SEQ ID NO: 622 - protein, 10 aa, synthetic construct
  REGION 1..10: note = Synthetic
IGNKAKGYTT

SEQ ID NO: 623 - protein, 10 aa, synthetic construct
  REGION 1..10: note = Synthetic
ARNGYGWFVY

SEQ ID NO: 624 - protein, 119 aa, synthetic construct
  REGION 1..119: note = Synthetic
EVMLVESGGGLVQPGGSLRLSCATSGFTFTDYYMSWVRQPPGKALEWLGFIGNKAKGYTTEYSASVKGRFTISRDNSQSILYLQMNTLRAEDSATYYCARNGYGWFVYWGQGTLVTVSA

SEQ ID NO: 625 - DNA, 357 bp, synthetic construct
  misc_feature 1..357: note = Synthetic
  source 1..357: mol_type = other DNA
gaagttatgttagttgaatctggtggtggtttagttcaacctggtggttctttacgtttatcttgtgctacttctggttttacttttactgattattatatgtcttgggttcgtcaacctcctggtaaagctttagaatggttaggttttattggtaataaagctaaaggttatactactgaatattctgcttctgttaaaggtcgttttactatttctcgtgataattctcaatctattttatatttacaaatgaatactttacgtgctgaagattctgctacttattattgtgctcgtaatggttatggttggtttgtttattggggtcaaggtactttagttactgtttctgct

SEQ ID NO: 626 - protein, 11 aa, synthetic construct
  REGION 1..11: note = Synthetic
QSLVHSNGNTY

SEQ ID NO: 627 - skipped

SEQ ID NO: 628 - protein, 10 aa, synthetic construct
  REGION 1..10: note = Synthetic
SQSTHVPPYT

SEQ ID NO: 629 - protein, 113 aa, synthetic construct; identical to SEQ ID NO: 399
  REGION 1..113: note = Synthetic

SEQ ID NO: 630 - DNA, 339 bp, synthetic construct
  misc_feature 1..339: note = Synthetic
  source 1..339: mol_type = other DNA
gatgttgttatgactcaaactcctttatctttacctgtttctttaggtgatcaagcttctatttcttgtcgttcttctcaatctttagttcattctaatggtaatacttatttacattggtatttacaaaaacctggtcaatctcctaaattattaatttataaagtttctaatcgtttttctggtgttcctgatcgtttttctggttctggttctggtactgattttactttaaaaatttctcgtgttgaagctgaagatttaggtgtttatttttgttctcaatctactcatgttcctccttatacttttggtggtggtactaaattagaaattaaa

SEQ ID NO: 631 - protein, 8 aa, synthetic construct
  REGION 1..8: note = Synthetic
GFTFSSYA

SEQ ID NO: 632 - protein, 8 aa, synthetic construct
  REGION 1..8: note = Synthetic
ISSGGGYT

SEQ ID NO: 633 - protein, 10 aa, synthetic construct
  REGION 1..10: note = Synthetic
ARGFITIFDY

SEQ ID NO: 634 - protein, 117 aa, synthetic construct
  REGION 1..117: note = Synthetic
EVKLVESGGGLVQPGGSLKLSCAASGFTFSSYAMSWVRQSPEKKLEWVAEISSGGGYTYYPDSVKGRFTISRDNAKNTLYLQMSSLRSEDTATYYCARGFITIFDYWGQGTTVTVSS

SEQ ID NO: 635 - DNA, 351 bp, synthetic construct
  misc_feature 1..351: note = Synthetic
  source 1..351: mol_type = other DNA
gaagttaaattagttgaatctggtggtggtttagttcaacctggtggttctttaaaattatcttgtgctgcttctggttttactttttcttcttatgctatgtcttgggttcgtcaatctcctgaaaaaaaattagaatgggttgctgaaatttcttctggtggtggttatacttattatcctgattctgttaaaggtcgttttactatttctcgtgataatgctaaaaatactttatatttacaaatgtcttctttacgttctgaagatactgctacttattattgtgctcgtggttttattactatttttgattattggggtcaaggtactactgttactgtttcttct

SEQ ID NO: 636 - protein, 11 aa, synthetic construct
  REGION 1..11: note = Synthetic
QSLVHSNGNTY

SEQ ID NO: 637 - skipped

SEQ ID NO: 638 - protein, 10 aa, synthetic construct
  REGION 1..10: note = Synthetic
SQSTHVPPYT

SEQ ID NO: 639 - protein, 113 aa, synthetic construct; identical to SEQ ID NO: 399
  REGION 1..113: note = Synthetic

SEQ ID NO: 640 - DNA, 339 bp, synthetic construct; identical to SEQ ID NO: 630
  misc_feature 1..339: note = Synthetic
  source 1..339: mol_type = other DNA

SEQ ID NO: 641 - protein, 8 aa, synthetic construct
  REGION 1..8: note = Synthetic
GFPFGNYL

SEQ ID NO: 642 - protein, 8 aa, synthetic construct
  REGION 1..8: note = Synthetic
ISGGGVST

SEQ ID NO: 643 - protein, 12 aa, synthetic construct
  REGION 1..12: note = Synthetic
ARGPSSWPAFDV

SEQ ID NO: 644 - protein, 119 aa, synthetic construct; identical to SEQ ID NO: 434
  REGION 1..119: note = Synthetic

SEQ ID NO: 645 - DNA, 357 bp, synthetic construct; identical to SEQ ID NO: 545
  misc_feature 1..357: note = Synthetic
  source 1..357: mol_type = other DNA

SEQ ID NO: 646 - protein, 6 aa, synthetic construct
  REGION 1..6: note = Synthetic
QSISSY

SEQ ID NO: 647 - skipped

SEQ ID NO: 648 - protein, 9 aa, synthetic construct
  REGION 1..9: note = Synthetic
QQSYSTPPT

SEQ ID NO: 649 - protein, 107 aa, synthetic construct
  REGION 1..107: note = Synthetic
DIQMTQSPSSLSASVGDRVTITCRASQSISSYLNWYQQKPGKAPKLLIYGWSSLQSGVPSRFSGSGSGTDFTLTISSLQPEDFATYYCQQSYSTPPTFGQGTKVEIK

SEQ ID NO: 650 - DNA, 321 bp, synthetic construct
  misc_feature 1..321: note = Synthetic
  source 1..321: mol_type = other DNA
gatattcaaatgactcaatctccttcttctttatctgcttctgttggtgatcgtgttactattacttgtcgtgcttctcaatctatttcttcttatttaaattggtatcaacaaaaacctggtaaagctcctaaattattaatttatggttggtcttctttacaatctggtgttccttctcgtttttctggttctggttctggtactgattttactttaactatttcttctttacaacctgaagattttgctacttattattgtcaacaatcttattctactcctcctacttttggtcaaggtactaaagttgaaattaaa

SEQ ID NO: 651 - protein, 8 aa, synthetic construct
  REGION 1..8: note = Synthetic
GFTFTDYY

SEQ ID NO: 652 - protein, 10 aa, synthetic construct
  REGION 1..10: note = Synthetic
IRNKANGYTT

SEQ ID NO: 653 - protein, 13 aa, synthetic construct
  REGION 1..13: note = Synthetic
ARDRGWLRGYFDV

SEQ ID NO: 654 - protein, 122 aa, synthetic construct; identical to SEQ ID NO: 594
  REGION 1..122: note = Synthetic

SEQ ID NO: 655 - DNA, 366 bp, synthetic construct; identical to SEQ ID NO: 595
  misc_feature 1..366: note = Synthetic
  source 1..366: mol_type = other DNA

SEQ ID NO: 656 - protein, 6 aa, synthetic construct
  REGION 1..6: note = Synthetic
QSISSY

SEQ ID NO: 657 - skipped

SEQ ID NO: 658 - protein, 9 aa, synthetic construct
  REGION 1..9: note = Synthetic
QQSYSGPPT

SEQ ID NO: 659 - protein, 107 aa, synthetic construct
  REGION 1..107: note = Synthetic
DIQMTQSPSSLSASVGDRVTITCRASQSISSYLNWYQQKPGKAPKLLIYAASSLQSGVPSRFSGSGSGTDFTLTISSLQPEDFATYYCQQSYSGPPTFGQGTKVEIK

SEQ ID NO: 660 - DNA, 321 bp, synthetic construct
  misc_feature 1..321: note = Synthetic
  source 1..321: mol_type = other DNA
gatattcaaatgactcaatctccttcttctttatctgcttctgttggtgatcgtgttactattacttgtcgtgcttctcaatctatttcttcttatttaaattggtatcaacaaaaacctggtaaagctcctaaattattaatttatgctgcttcttctttacaatctggtgttccttctcgtttttctggttctggttctggtactgattttactttaactatttcttctttacaacctgaagattttgctacttattattgtcaacaatcttattctggtcctcctacttttggtcaaggtactaaagttgaaattaaa

SEQ ID NO: 661 - protein, 8 aa, synthetic construct
  REGION 1..8: note = Synthetic
GYTFNIYS

SEQ ID NO: 662 - protein, 10 aa, synthetic construct
  REGION 1..10: note = Synthetic
IRSKYNNYAT

SEQ ID NO: 663 - protein, 16 aa, synthetic construct
  REGION 1..16: note = Synthetic
VRHGNFGNSYVSWFAY

SEQ ID NO: 664 - protein, 125 aa, synthetic construct
  REGION 1..125: note = Synthetic
EVQLVESGGGLVQPGGSLRLSCAASGYTFNIYSMNWVRQAPGKGLEWVGRIRSKYNNYATYYADSVKGRFTISRDDSKNTLYLQMNSLRAEDTAVYYCVRHGNFGNSYVSWFAYWGQGTLVTVSS

SEQ ID NO: 665 - DNA, 375 bp, synthetic construct
  misc_feature 1..375: note = Synthetic
  source 1..375: mol_type = other DNA
gaagttcaattagttgaatctggtggtggtttagttcaacctggtggttctttacgtttatcttgtgctgcttctggttatacttttaatatttattctatgaattgggttcgtcaagctcctggtaaaggtttagaatgggttggtcgtattcgttctaaatataataattatgctacttattatgctgattctgttaaaggtcgttttactatttctcgtgatgattctaaaaatactttatatttacaaatgaattctttacgtgctgaagatactgctgtttattattgtgttcgtcatggtaattttggtaattcttatgtttcttggtttgcttattggggtcaaggtactttagttactgtttcttct

SEQ ID NO: 666 - protein, 9 aa, synthetic construct
  REGION 1..9: note = Synthetic
TGAVTTSNY

SEQ ID NO: 667 - skipped

SEQ ID NO: 668 - protein, 9 aa, synthetic construct
  REGION 1..9: note = Synthetic
ALWYSNLWV

SEQ ID NO: 669 - protein, 110 aa, synthetic construct
  REGION 1..110: note = Synthetic
DIQMTQSPSSLSASVGDRVTITCRSSTGAVTTSNYANWVQQKPGKAPKGLIGGTNKRAPGVPARFSGSGSGTDFTLTISSLQPEDFATYYCALWYSNLWVFGQGTKVEIK

SEQ ID NO: 670 - DNA, 330 bp, synthetic construct
  misc_feature 1..330: note = Synthetic
  source 1..330: mol_type = other DNA
gatattcaaatgactcaatctccttcttctttatctgcttctgttggtgatcgtgttactattacttgtcgttcttctactggtgctgttactacttctaattatgctaattgggttcaacaaaaacctggtaaagctcctaaaggtttaattggtggtactaataaacgtgctcctggtgttcctgctcgtttttctggttctggttctggtactgattttactttaactatttcttctttacaacctgaagattttgctacttattattgtgctttatggtattctaatttatgggtttttggtcaaggtactaaagttgaaattaaa

SEQ ID NO: 671 - protein, 8 aa, synthetic construct
  REGION 1..8: note = Synthetic
GFGFNAYA

SEQ ID NO: 672 - protein, 10 aa, synthetic construct
  REGION 1..10: note = Synthetic
IRSKYNNYAT

SEQ ID NO: 673 - protein, 16 aa, synthetic construct
  REGION 1..16: note = Synthetic
VRHGNFGNSYVSWFAY

SEQ ID NO: 674 - protein, 125 aa, synthetic construct
  REGION 1..125: note = Synthetic
EVQLVESGGGLVQPGGSLRLSCAASGFGFNAYAMNWVRQAPGKGLEWVGRIRSKYNNYATYYADSVKGRFTISRDDSKNTLYLQMNSLRAEDTAVYYCVRHGNFGNSYVSWFAYWGQGTLVTVSS

SEQ ID NO: 675 - DNA, 375 bp, synthetic construct
  misc_feature 1..375: note = Synthetic
  source 1..375: mol_type = other DNA
gaagttcaattagttgaatctggtggtggtttagttcaacctggtggttctttacgtttatcttgtgctgcttctggttttggttttaatgcttatgctatgaattgggttcgtcaagctcctggtaaaggtttagaatgggttggtcgtattcgttctaaatataataattatgctacttattatgctgattctgttaaaggtcgttttactatttctcgtgatgattctaaaaatactttatatttacaaatgaattctttacgtgctgaagatactgctgtttattattgtgttcgtcatggtaattttggtaattcttatgtttcttggtttgcttattggggtcaaggtactttagttactgtttcttct

SEQ ID NO: 676 - protein, 9 aa, synthetic construct
  REGION 1..9: note = Synthetic
TGAVTTSNY

SEQ ID NO: 677 - skipped

SEQ ID NO: 678 - protein, 9 aa, synthetic construct
  REGION 1..9: note = Synthetic
ALWYSNLWV

SEQ ID NO: 679 - protein, 110 aa, synthetic construct; identical to SEQ ID NO: 669
  REGION 1..110: note = Synthetic

SEQ ID NO: 680 - DNA, 330 bp, synthetic construct; identical to SEQ ID NO: 670
  misc_feature 1..330: note = Synthetic
  source 1..330: mol_type = other DNA

SEQ ID NO: 681 - protein, 8 aa, synthetic construct
  REGION 1..8: note = Synthetic
RFTFETYA

SEQ ID NO: 682 - protein, 10 aa, synthetic construct
  REGION 1..10: note = Synthetic
IRSKYNNYAT

SEQ ID NO: 683 - protein, 16 aa, synthetic construct
  REGION 1..16: note = Synthetic
VRHGNFGNSYVSWFAY

SEQ ID NO: 684 - protein, 125 aa, synthetic construct
  REGION 1..125: note = Synthetic
EVQLVESGGGLVQPGGSLRLSCAASRFTFETYAMNWVRQAPGKGLEWVGRIRSKYNNYATYYADSVKGRFTISRDDSKNTLYLQMNSLRAEDTAVYYCVRHGNFGNSYVSWFAYWGQGTLVTVSS

SEQ ID NO: 685 - DNA, 375 bp, synthetic construct
  misc_feature 1..375: note = Synthetic
  source 1..375: mol_type = other DNA
gaagttcaattagttgaatctggtggtggtttagttcaacctggtggttctttacgtttatcttgtgctgcttctcgttttacttttgaaacttatgctatgaattgggttcgtcaagctcctggtaaaggtttagaatgggttggtcgtattcgttctaaatataataattatgctacttattatgctgattctgttaaaggtcgttttactatttctcgtgatgattctaaaaatactttatatttacaaatgaattctttacgtgctgaagatactgctgtttattattgtgttcgtcatggtaattttggtaattcttatgtttcttggtttgcttattggggtcaaggtactttagttactgtttcttct

SEQ ID NO: 686 - protein, 9 aa, synthetic construct
  REGION 1..9: note = Synthetic
TGAVTTSNY

SEQ ID NO: 687 - skipped

SEQ ID NO: 688 - protein, 9 aa, synthetic construct
  REGION 1..9: note = Synthetic
ALWYSNLWV

SEQ ID NO: 689 - protein, 110 aa, synthetic construct; identical to SEQ ID NO: 669
  REGION 1..110: note = Synthetic

SEQ ID NO: 690 - DNA, 330 bp, synthetic construct; identical to SEQ ID NO: 670
  misc_feature 1..330: note = Synthetic
  source 1..330: mol_type = other DNA

SEQ ID NO: 691 - protein, 8 aa, synthetic construct
  REGION 1..8: note = Synthetic
GFAFNAYA

SEQ ID NO: 692 - protein, 10 aa, synthetic construct
  REGION 1..10: note = Synthetic
IRSKYNNYAT

SEQ ID NO: 693 - protein, 16 aa, synthetic construct
  REGION 1..16: note = Synthetic
VRHGNFGNSYVSWFAY

SEQ ID NO: 694 - protein, 125 aa, synthetic construct
  REGION 1..125: note = Synthetic
EVQLVESGGGLVQPGGSLRLSCAASGFAFNAYAMNWVRQAPGKGLEWVGRIRSKYNNYATYYADSVKGRFTISRDDSKNTLYLQMNSLRAEDTAVYYCVRHGNFGNSYVSWFAYWGQGTLVTVSS

SEQ ID NO: 695 - DNA, 375 bp, synthetic construct
  misc_feature 1..375: note = Synthetic
  source 1..375: mol_type = other DNA
gaagttcaattagttgaatctggtggtggtttagttcaacctggtggttctttacgtttatcttgtgctgcttctggttttgcttttaatgcttatgctatgaattgggttcgtcaagctcctggtaaaggtttagaatgggttggtcgtattcgttctaaatataataattatgctacttattatgctgattctgttaaaggtcgttttactatttctcgtgatgattctaaaaatactttatatttacaaatgaattctttacgtgctgaagatactgctgtttattattgtgttcgtcatggtaattttggtaattcttatgtttcttggtttgcttattggggtcaaggtactttagttactgtttcttct

SEQ ID NO: 696 - protein, 9 aa, synthetic construct
  REGION 1..9: note = Synthetic
TGAVTTSNY

SEQ ID NO: 697 - skipped

SEQ ID NO: 698 - protein, 9 aa, synthetic construct
  REGION 1..9: note = Synthetic
ALWYSNLWV

SEQ ID NO: 699 - protein, 110 aa, synthetic construct; identical to SEQ ID NO: 669
  REGION 1..110: note = Synthetic

SEQ ID NO: 700 - DNA, 330 bp, synthetic construct; identical to SEQ ID NO: 670
  misc_feature 1..330: note = Synthetic
  source 1..330: mol_type = other DNA

SEQ ID NO: 701 - protein, 8 aa, synthetic construct
  REGION 1..8: note = Synthetic
DFTFETYA

SEQ ID NO: 702 - protein, 10 aa, synthetic construct
  REGION 1..10: note = Synthetic
IRSKYNNYAT

SEQ ID NO: 703 - protein, 16 aa, synthetic construct
  REGION 1..16: note = Synthetic
VRHGNFGNSYVSWFAY

SEQ ID NO: 704 - protein, 125 aa, synthetic construct
  REGION 1..125: note = Synthetic
EVQLVESGGGLVQPGGSLRLSCAASDFTFETYAMNWVRQAPGKGLEWVGRIRSKYNNYATYYADSVKGRFTISRDDSKNTLYLQMNSLRAEDTAVYYCVRHGNFGNSYVSWFAYWGQGTLVTVSS

SEQ ID NO: 705 - DNA, 375 bp, synthetic construct
  misc_feature 1..375: note = Synthetic
  source 1..375: mol_type = other DNA
gaagttcaattagttgaatctggtggtggtttagttcaacctggtggttctttacgtttatcttgtgctgcttctgattttacttttgaaacttatgctatgaattgggttcgtcaagctcctggtaaaggtttagaatgggttggtcgtattcgttctaaatataataattatgctacttattatgctgattctgttaaaggtcgttttactatttctcgtgatgattctaaaaatactttatatttacaaatgaattctttacgtgctgaagatactgctgtttattattgtgttcgtcatggtaattttggtaattcttatgtttcttggtttgcttattggggtcaaggtactttagttactgtttcttct

SEQ ID NO: 706 - protein, 9 aa, synthetic construct
  REGION 1..9: note = Synthetic
TGAVTTSNY

SEQ ID NO: 707 - skipped

SEQ ID NO: 708 - protein, 9 aa, synthetic construct
  REGION 1..9: note = Synthetic
ALWYSNLWV

SEQ ID NO: 709 - protein, 110 aa, synthetic construct; identical to SEQ ID NO: 669
  REGION 1..110: note = Synthetic

SEQ ID NO: 710 - DNA, 330 bp, synthetic construct; identical to SEQ ID NO: 670
  misc_feature 1..330: note = Synthetic
  source 1..330: mol_type = other DNA

SEQ ID NO: 711 - protein, 8 aa, synthetic construct
  REGION 1..8: note = Synthetic
GFAFNVYA

SEQ ID NO: 712 - protein, 10 aa, synthetic construct
  REGION 1..10: note = Synthetic
IRSKYNNYAT

SEQ ID NO: 713 - protein, 16 aa, synthetic construct
  REGION 1..16: note = Synthetic
VRHGNFGNSYVSWFAY

SEQ ID NO: 714 - protein, 125 aa, synthetic construct
  REGION 1..125: note = Synthetic
EVQLVESGGGLVQPGGSLRLSCAASGFAFNVYAMNWVRQAPGKGLEWVGRIRSKYNNYATYYADSVKGRFTISRDDSKNTLYLQMNSLRAEDTAVYYCVRHGNFGNSYVSWFAYWGQGTLVTVSS

SEQ ID NO: 715 - DNA, 375 bp, synthetic construct
  misc_feature 1..375: note = Synthetic
  source 1..375: mol_type = other DNA
gaagttcaattagttgaatctggtggtggtttagttcaacctggtggttctttacgtttatcttgtgctgcttctggttttgcttttaatgtttatgctatgaattgggttcgtcaagctcctggtaaaggtttagaatgggttggtcgtattcgttctaaatataataattatgctacttattatgctgattctgttaaaggtcgttttactatttctcgtgatgattctaaaaatactttatatttacaaatgaattctttacgtgctgaagatactgctgtttattattgtgttcgtcatggtaattttggtaattcttatgtttcttggtttgcttattggggtcaaggtactttagttactgtttcttct

SEQ ID NO: 716 - protein, 9 aa, synthetic construct
  REGION 1..9: note = Synthetic
TGAVTTSNY

SEQ ID NO: 717 - skipped

SEQ ID NO: 718 - protein, 9 aa, synthetic construct
  REGION 1..9: note = Synthetic
ALWYSNLWV

SEQ ID NO: 719 - protein, 110 aa, synthetic construct; identical to SEQ ID NO: 669
  REGION 1..110: note = Synthetic

SEQ ID NO: 720 - DNA, 330 bp, synthetic construct; identical to SEQ ID NO: 670
  misc_feature 1..330: note = Synthetic
  source 1..330: mol_type = other DNA

SEQ ID NO: 721 - protein, 8 aa, synthetic construct
  REGION 1..8: note = Synthetic
GFDFNAYA

SEQ ID NO: 722 - protein, 10 aa, synthetic construct
  REGION 1..10: note = Synthetic
IRSKYNNYAT

SEQ ID NO: 723 - protein, 16 aa, synthetic construct
  REGION 1..16: note = Synthetic
VRHGNFGNSYVSWFAY

SEQ ID NO: 724 - protein, 125 aa, synthetic construct
  REGION 1..125: note = Synthetic
EVQLVESGGGLVQPGGSLRLSCAASGFDFNAYAMNWVRQAPGKGLEWVGRIRSKYNNYATYYADSVKGRFTISRDDSKNTLYLQMNSLRAEDTAVYYCVRHGNFGNSYVSWFAYWGQGTLVTVSS

SEQ ID NO: 725 - DNA, 375 bp, synthetic construct
  misc_feature 1..375: note = Synthetic
  source 1..375: mol_type = other DNA
gaagttcaattagttgaatctggtggtggtttagttcaacctggtggttctttacgtttatcttgtgctgcttctggttttgattttaatgcttatgctatgaattgggttcgtcaagctcctggtaaaggtttagaatgggttggtcgtattcgttctaaatataataattatgctacttattatgctgattctgttaaaggtcgttttactatttctcgtgatgattctaaaaatactttatatttacaaatgaattctttacgtgctgaagatactgctgtttattattgtgttcgtcatggtaattttggtaattcttatgtttcttggtttgcttattggggtcaaggtactttagttactgtttcttct

SEQ ID NO: 726 - protein, 9 aa, synthetic construct
  REGION 1..9: note = Synthetic
TGAVTTSNY

SEQ ID NO: 727 - skipped

SEQ ID NO: 728 - protein, 9 aa, synthetic construct
  REGION 1..9: note = Synthetic
ALWYSNLWV

SEQ ID NO: 729 - protein, 110 aa, synthetic construct; identical to SEQ ID NO: 669
  REGION 1..110: note = Synthetic

SEQ ID NO: 730 - DNA, 330 bp, synthetic construct; identical to SEQ ID NO: 670
  misc_feature 1..330: note = Synthetic
  source 1..330: mol_type = other DNA

SEQ ID NO: 731 - protein, 8 aa, synthetic construct
  REGION 1..8: note = Synthetic
GFTFNIQA

SEQ ID NO: 732 - protein, 10 aa, synthetic construct
  REGION 1..10: note = Synthetic
IRSKYNNYAT

SEQ ID NO: 733 - protein, 16 aa, synthetic construct
  REGION 1..16: note = Synthetic
VRHGNFGNSYVSWFAY

SEQ ID NO: 734 - protein, 125 aa, synthetic construct
  REGION 1..125: note = Synthetic
EVQLVESGGGLVQPGGSLRLSCAASGFTFNIQAMNWVRQAPGKGLEWVGRIRSKYNNYATYYADSVKGRFTISRDDSKNTLYLQMNSLRAEDTAVYYCVRHGNFGNSYVSWFAYWGQGTLVTVSS

SEQ ID NO: 735 - DNA, 375 bp, synthetic construct
  misc_feature 1..375: note = Synthetic
  source 1..375: mol_type = other DNA
gaagttcaattagttgaatctggtggtggtttagttcaacctggtggttctttacgtttatcttgtgctgcttctggttttacttttaatattcaagctatgaattgggttcgtcaagctcctggtaaaggtttagaatgggttggtcgtattcgttctaaatataataattatgctacttattatgctgattctgttaaaggtcgttttactatttctcgtgatgattctaaaaatactttatatttacaaatgaattctttacgtgctgaagatactgctgtttattattgtgttcgtcatggtaattttggtaattcttatgtttcttggtttgcttattggggtcaaggtactttagttactgtttcttct

SEQ ID NO: 736 - protein, 9 aa, synthetic construct
  REGION 1..9: note = Synthetic
TGAVTTSNY

SEQ ID NO: 737 - skipped

SEQ ID NO: 738 - protein, 9 aa, synthetic construct
  REGION 1..9: note = Synthetic
ALWYSNLWV

SEQ ID NO: 739 - protein, 110 aa, synthetic construct; identical to SEQ ID NO: 669
  REGION 1..110: note = Synthetic

SEQ ID NO: 740 - DNA, 330 bp, synthetic construct; identical to SEQ ID NO: 670
  misc_feature 1..330: note = Synthetic
  source 1..330: mol_type = other DNA

SEQ ID NO: 741 - protein, 8 aa, synthetic construct
  REGION 1..8: note = Synthetic
GFTFETYA

SEQ ID NO: 742 - protein, 10 aa, synthetic construct
  REGION 1..10: note = Synthetic
IRSKYNNYAT

SEQ ID NO: 743 - protein, 16 aa, synthetic construct
  REGION 1..16: note = Synthetic
VRHGNFGNSYVSWFAY

SEQ ID NO: 744 - protein, 125 aa, synthetic construct
  REGION 1..125: note = Synthetic
EVQLVESGGGLVQPGGSLRLSCAASGFTFETYAMNWVRQAPGKGLEWVGRIRSKYNNYATYYADSVKGRFTISRDDSKNTLYLQMNSLRAEDTAVYYCVRHGNFGNSYVSWFAYWGQGTLVTVSS

SEQ ID NO: 745 - DNA, 375 bp, synthetic construct
  misc_feature 1..375: note = Synthetic
  source 1..375: mol_type = other DNA
gaagttcaattagttgaatctggtggtggtttagttcaacctggtggttctttacgtttatcttgtgctgcttctggttttacttttgaaacttatgctatgaattgggttcgtcaagctcctggtaaaggtttagaatgggttggtcgtattcgttctaaatataataattatgctacttattatgctgattctgttaaaggtcgttttactatttctcgtgatgattctaaaaatactttatatttacaaatgaattctttacgtgctgaagatactgctgtttattattgtgttcgtcatggtaattttggtaattcttatgtttcttggtttgcttattggggtcaaggtactttagttactgtttcttct

SEQ ID NO: 746 - protein, 9 aa, synthetic construct
  REGION 1..9: note = Synthetic
TGAVTTSNY

SEQ ID NO: 747 - skipped

SEQ ID NO: 748 - protein, 9 aa, synthetic construct
  REGION 1..9: note = Synthetic
ALWYSNLWV

SEQ ID NO: 749 - protein, 110 aa, synthetic construct; identical to SEQ ID NO: 669
  REGION 1..110: note = Synthetic

SEQ ID NO: 750 - DNA, 330 bp, synthetic construct; identical to SEQ ID NO: 670
  misc_feature 1..330: note = Synthetic
  source 1..330: mol_type = other DNA

SEQ ID NO: 751 - protein, 8 aa, synthetic construct
  REGION 1..8: note = Synthetic
GFSFVTYA

SEQ ID NO: 752 - protein, 10 aa, synthetic construct
  REGION 1..10: note = Synthetic
IRSKYNNYAT

SEQ ID NO: 753 - protein, 16 aa, synthetic construct
  REGION 1..16: note = Synthetic
VRHGNFGNSYVSWFAY

SEQ ID NO: 754 - protein, 125 aa, synthetic construct
  REGION 1..125: note = Synthetic
EVQLVESGGGLVQPGGSLRLSCAASGFSFVTYAMNWVRQAPGKGLEWVGRIRSKYNNYATYYADSVKGRFTISRDDSKNTLYLQMNSLRAEDTAVYYCVRHGNFGNSYVSWFAYWGQGTLVTVSS

SEQ ID NO: 755 - DNA, 375 bp, synthetic construct
  misc_feature 1..375: note = Synthetic
  source 1..375: mol_type = other DNA
gaagttcaattagttgaatctggtggtggtttagttcaacctggtggttctttacgtttatcttgtgctgcttctggtttttcttttgttacttatgctatgaattgggttcgtcaagctcctggtaaaggtttagaatgggttggtcgtattcgttctaaatataataattatgctacttattatgctgattctgttaaaggtcgttttactatttctcgtgatgattctaaaaatactttatatttacaaatgaattctttacgtgctgaagatactgctgtttattattgtgttcgtcatggtaattttggtaattcttatgtttcttggtttgcttattggggtcaaggtactttagttactgtttcttct

SEQ ID NO: 756 - protein, 9 aa, synthetic construct
  REGION 1..9: note = Synthetic
TGAVTTSNY

SEQ ID NO: 757 - skipped

SEQ ID NO: 758 - protein, 9 aa, synthetic construct
  REGION 1..9: note = Synthetic
ALWYSNLWV

SEQ ID NO: 759 - protein, 110 aa, synthetic construct; identical to SEQ ID NO: 669
  REGION 1..110: note = Synthetic

SEQ ID NO: 760 - DNA, 330 bp, synthetic construct; identical to SEQ ID NO: 670
  misc_feature 1..330: note = Synthetic
  source 1..330: mol_type = other DNA

SEQ ID NO: 761 - protein, 8 aa, synthetic construct
  REGION 1..8: note = Synthetic
EFTFETYA

SEQ ID NO: 762 - protein, 10 aa, synthetic construct
  REGION 1..10: note = Synthetic
IRSKYNNYAT

SEQ ID NO: 763 - protein, 16 aa, synthetic construct
  REGION 1..16: note = Synthetic
VRHGNFGNSYVSWFAY

SEQ ID NO: 764 - protein, 125 aa, synthetic construct
  REGION 1..125: note = Synthetic
EVQLVESGGGLVQPGGSLRLSCAASEFTFETYAMNWVRQAPGKGLEWVGRIRSKYNNYATYYADSVKGRFTISRDDSKNTLYLQMNSLRAEDTAVYYCVRHGNFGNSYVSWFAYWGQGTLVTVSS

SEQ ID NO: 765 - DNA, 375 bp, synthetic construct
  misc_feature 1..375: note = Synthetic
  source 1..375: mol_type = other DNA
gaagttcaattagttgaatctggtggtggtttagttcaacctggtggttctttacgtttatcttgtgctgcttctgaatttacttttgaaacttatgctatgaattgggttcgtcaagctcctggtaaaggtttagaatgggttggtcgtattcgttctaaatataataattatgctacttattatgctgattctgttaaaggtcgttttactatttctcgtgatgattctaaaaatactttatatttacaaatgaattctttacgtgctgaagatactgctgtttattattgtgttcgtcatggtaattttggtaattcttatgtttcttggtttgcttattggggtcaaggtactttagttactgtttcttct

SEQ ID NO: 766 - protein, 9 aa, synthetic construct
  REGION 1..9: note = Synthetic
TGAVTTSNY

SEQ ID NO: 767 - skipped

SEQ ID NO: 768 - protein, 9 aa, synthetic construct
  REGION 1..9: note = Synthetic
ALWYSNLWV

SEQ ID NO: 769 - protein, 110 aa, synthetic construct; identical to SEQ ID NO: 669
  REGION 1..110: note = Synthetic

SEQ ID NO: 770 - DNA, 330 bp, synthetic construct; identical to SEQ ID NO: 670
  misc_feature 1..330: note = Synthetic
  source 1..330: mol_type = other DNA

SEQ ID NO: 771 - protein, 8 aa, synthetic construct
  REGION 1..8: note = Synthetic
GFGFNVYA

SEQ ID NO: 772 - protein, 10 aa, synthetic construct
  REGION 1..10: note = Synthetic
IRSKYNNYAT

SEQ ID NO: 773 - protein, 16 aa, synthetic construct
  REGION 1..16: note = Synthetic
VRHGNFGNSYVSWFAY

SEQ ID NO: 774 - protein, 125 aa, synthetic construct
  REGION 1..125: note = Synthetic
EVQLVESGGGLVQPGGSLRLSCAASGFGFNVYAMNWVRQAPGKGLEWVGRIRSKYNNYATYYADSVKGRFTISRDDSKNTLYLQMNSLRAEDTAVYYCVRHGNFGNSYVSWFAYWGQGTLVTVSS

SEQ ID NO: 775 - DNA, 375 bp, synthetic construct
  misc_feature 1..375: note = Synthetic
  source 1..375: mol_type = other DNA
gaagttcaattagttgaatctggtggtggtttagttcaacctggtggttctttacgtttatcttgtgctgcttctggttttggttttaatgtttatgctatgaattgggttcgtcaagctcctggtaaaggtttagaatgggttggtcgtattcgttctaaatataataattatgctacttattatgctgattctgttaaaggtcgttttactatttctcgtgatgattctaaaaatactttatatttacaaatgaattctttacgtgctgaagatactgctgtttattattgtgttcgtcatggtaattttggtaattcttatgtttcttggtttgcttattggggtcaaggtactttagttactgtttcttct

SEQ ID NO: 776 - protein, 9 aa, synthetic construct
  REGION 1..9: note = Synthetic
TGAVTTSNY

SEQ ID NO: 777 - skipped

SEQ ID NO: 778 - protein, 9 aa, synthetic construct
  REGION 1..9: note = Synthetic
ALWYSNLWV

SEQ ID NO: 779 - protein, 110 aa, synthetic construct; identical to SEQ ID NO: 669
  REGION 1..110: note = Synthetic

SEQ ID NO: 780 - DNA, 330 bp, synthetic construct; identical to SEQ ID NO: 670
  misc_feature 1..330: note = Synthetic
  source 1..330: mol_type = other DNA

SEQ ID NO: 781 - protein, 8 aa, synthetic construct
  REGION 1..8: note = Synthetic
GFTFYTYI

SEQ ID NO: 782 - protein, 10 aa, synthetic construct
  REGION 1..10: note = Synthetic
IRSKYNNYAT

SEQ ID NO: 783 - protein, 16 aa, synthetic construct
  REGION 1..16: note = Synthetic
VRHGNFGNSYVSWFAY

SEQ ID NO: 784 - protein, 125 aa, synthetic construct
  REGION 1..125: note = Synthetic
EVQLVESGGGLVQPGGSLRLSCAASGFTFYTYIMNWVRQAPGKGLEWVGRIRSKYNNYATYYADSVKGRFTISRDDSKNTLYLQMNSLRAEDTAVYYCVRHGNFGNSYVSWFAYWGQGTLVTVSS

SEQ ID NO: 785 - DNA, 375 bp, synthetic construct
  misc_feature 1..375: note = Synthetic
  source 1..375: mol_type = other DNA
gaagttcaattagttgaatctggtggtggtttagttcaacctggtggttctttacgtttatcttgtgctgcttctggttttactttttatacttatattatgaattgggttcgtcaagctcctggtaaaggtttagaatgggttggtcgtattcgttctaaatataataattatgctacttattatgctgattctgttaaaggtcgttttactatttctcgtgatgattctaaaaatactttatatttacaaatgaattctttacgtgctgaagatactgctgtttattattgtgttcgtcatggtaattttggtaattcttatgtttcttggtttgcttattggggtcaaggtactttagttactgtttcttct

SEQ ID NO: 786 - protein, 9 aa, synthetic construct
  REGION 1..9: note = Synthetic
TGAVTTSNY

SEQ ID NO: 787 - skipped

SEQ ID NO: 788 - protein, 9 aa, synthetic construct
  REGION 1..9: note = Synthetic
ALWYSNLWV

SEQ ID NO: 789 - protein, 110 aa, synthetic construct; identical to SEQ ID NO: 669
  REGION 1..110: note = Synthetic

SEQ ID NO: 790 - DNA, 330 bp, synthetic construct; identical to SEQ ID NO: 670
  misc_feature 1..330: note = Synthetic
  source 1..330: mol_type = other DNA

SEQ ID NO: 791 - protein, 8 aa, synthetic construct
  REGION 1..8: note = Synthetic
GYTFNVYA

SEQ ID NO: 792 - protein, 10 aa, synthetic construct
  REGION 1..10: note = Synthetic
IRSKYNNYAT

SEQ ID NO: 793 - protein, 16 aa, synthetic construct
  REGION 1..16: note = Synthetic
VRHGNFGNSYVSWFAY

SEQ ID NO: 794 - protein, 125 aa, synthetic construct
  REGION 1..125: note = Synthetic
EVQLVESGGGLVQPGGSLRLSCAASGYTFNVYAMNWVRQAPGKGLEWVGRIRSKYNNYATYYADSVKGRFTISRDDSKNTLYLQMNSLRAEDTAVYYCVRHGNFGNSYVSWFAYWGQGTLVTVSS

SEQ ID NO: 795 - DNA, 375 bp, synthetic construct
  misc_feature 1..375: note = Synthetic
  source 1..375: mol_type = other DNA
gaagttcaattagttgaatctggtggtggtttagttcaacctggtggttctttacgtttatcttgtgctgcttctggttatacttttaatgtttatgctatgaattgggttcgtcaagctcctggtaaaggtttagaatgggttggtcgtattcgttctaaatataataattatgctacttattatgctgattctgttaaaggtcgttttactatttctcgtgatgattctaaaaatactttatatttacaaatgaattctttacgtgctgaagatactgctgtttattattgtgttcgtcatggtaattttggtaattcttatgtttcttggtttgcttattggggtcaaggtactttagttactgtttcttct

SEQ ID NO: 796 - protein, 9 aa, synthetic construct
  REGION 1..9: note = Synthetic
TGAVTTSNY

SEQ ID NO: 797 - skipped

SEQ ID NO: 798 - protein, 9 aa, synthetic construct
  REGION 1..9: note = Synthetic
ALWYSNLWV

SEQ ID NO: 799 - protein, 110 aa, synthetic construct; identical to SEQ ID NO: 669
  REGION 1..110: note = Synthetic

SEQ ID NO: 800 - DNA, 330 bp, synthetic construct; identical to SEQ ID NO: 670
  misc_feature 1..330: note = Synthetic
  source 1..330: mol_type = other DNA

SEQ ID NO: 801 - protein, 8 aa, synthetic construct
  REGION 1..8: note = Synthetic
GFTFNPYA

SEQ ID NO: 802 - protein, 10 aa, synthetic construct
  REGION 1..10: note = Synthetic
IRSKYNNYAT

SEQ ID NO: 803 - protein, 16 aa, synthetic construct
  REGION 1..16: note = Synthetic
VRHGNFGNSYVSWFAY

SEQ ID NO: 804 - protein, 125 aa, synthetic construct
  REGION 1..125: note = Synthetic
EVQLVESGGGLVQPGGSLRLSCAASGFTFNPYAMNWVRQAPGKGLEWVGRIRSKYNNYATYYADSVKGRFTISRDDSKNTLYLQMNSLRAEDTAVYYCVRHGNFGNSYVSWFAYWGQGTLVTVSS

SEQ ID NO: 805 - DNA, 375 bp, synthetic construct
  misc_feature 1..375: note = Synthetic
  source 1..375: mol_type = other DNA
gaagttcaattagttgaatctggtggtggtttagttcaacctggtggttctttacgtttatcttgtgctgcttctggttttacttttaatccttatgctatgaattgggttcgtcaagctcctggtaaaggtttagaatgggttggtcgtattcgttctaaatataataattatgctacttattatgctgattctgttaaaggtcgttttactatttctcgtgatgattctaaaaatactttatatttacaaatgaattctttacgtgctgaagatactgctgtttattattgtgttcgtcatggtaattttggtaattcttatgtttcttggtttgcttattggggtcaaggtactttagttactgtttcttct

SEQ ID NO: 806 - protein, 9 aa, synthetic construct
  REGION 1..9: note = Synthetic
TGAVTTSNY

SEQ ID NO: 807 - skipped

SEQ ID NO: 808 - protein, 9 aa, synthetic construct
  REGION 1..9: note = Synthetic
ALWYSNLWV

SEQ ID NO: 809 - protein, 110 aa, synthetic construct; identical to SEQ ID NO: 669
  REGION 1..110: note = Synthetic

SEQ ID NO: 810 - DNA, 330 bp, synthetic construct; identical to SEQ ID NO: 670
  misc_feature 1..330: note = Synthetic
  source 1..330: mol_type = other DNA

SEQ ID NO: 811 - protein, 8 aa, synthetic construct
  REGION 1..8: note = Synthetic
GFTFTTYA

SEQ ID NO: 812 - protein, 10 aa, synthetic construct
  REGION 1..10: note = Synthetic
IRSKYNNYAT

SEQ ID NO: 813 - protein, 16 aa, synthetic construct
  REGION 1..16: note = Synthetic
VRHGNFGNSYVSWFAY

SEQ ID NO: 814 - protein, 125 aa, synthetic construct
  REGION 1..125: note = Synthetic
EVQLVESGGGLVQPGGSLRLSCAASGFTFTTYAMNWVRQAPGKGLEWVGRIRSKYNNYATYYADSVKGRFTISRDDSKNTLYLQMNSLRAEDTAVYYCVRHGNFGNSYVSWFAYWGQGTLVTVSS

SEQ ID NO: 815 - DNA, 375 bp, synthetic construct
  misc_feature 1..375: note = Synthetic
  source 1..375: mol_type = other DNA
gaagttcaattagttgaatctggtggtggtttagttcaacctggtggttctttacgtttatcttgtgctgcttctggttttacttttactacttatgctatgaattgggttcgtcaagctcctggtaaaggtttagaatgggttggtcgtattcgttctaaatataataattatgctacttattatgctgattctgttaaaggtcgttttactatttctcgtgatgattctaaaaatactttatatttacaaatgaattctttacgtgctgaagatactgctgtttattattgtgttcgtcatggtaattttggtaattcttatgtttcttggtttgcttattggggtcaaggtactttagttactgtttcttct

SEQ ID NO: 816 - protein, 9 aa, synthetic construct
  REGION 1..9: note = Synthetic
TGAVTTSNY

SEQ ID NO: 817 - skipped

SEQ ID NO: 818 - protein, 9 aa, synthetic construct
  REGION 1..9: note = Synthetic
ALWYSNLWV

SEQ ID NO: 819 - protein, 110 aa, synthetic construct; identical to SEQ ID NO: 669
  REGION 1..110: note = Synthetic

SEQ ID NO: 820 - DNA, 330 bp, synthetic construct; identical to SEQ ID NO: 670
  misc_feature 1..330: note = Synthetic
  source 1..330: mol_type = other DNA

SEQ ID NO: 821 - protein, 8 aa, synthetic construct
  REGION 1..8: note = Synthetic
GFTFNTYA

SEQ ID NO: 822 - protein, 10 aa, synthetic construct
  REGION 1..10: note = Synthetic
IRSKRSNYAT

SEQ ID NO: 823 - protein, 16 aa, synthetic construct
  REGION 1..16: note = Synthetic
VRHGNFGNSYVSWFAY

SEQ ID NO: 824 - protein, 125 aa, synthetic construct
  REGION 1..125: note = Synthetic
EVQLVESGGGLVQPGGSLRLSCAASGFTFNTYAMNWVRQAPGKGLEWVGRIRSKRSNYATYYADSVKGRFTISRDDSKNTLYLQMNSLRAEDTAVYYCVRHGNFGNSYVSWFAYWGQGTLVTVSS

SEQ ID NO: 825 - DNA, 375 bp, synthetic construct
  misc_feature 1..375: note = Synthetic
  source 1..375: mol_type = other DNA
gaagttcaattagttgaatctggtggtggtttagttcaacctggtggttctttacgtttatcttgtgctgcttctggttttacttttaatacttatgctatgaattgggttcgtcaagctcctggtaaaggtttagaatgggttggtcgtattcgttctaaacgttctaattatgctacttattatgctgattctgttaaaggtcgttttactatttctcgtgatgattctaaaaatactttatatttacaaatgaattctttacgtgctgaagatactgctgtttattattgtgttcgtcatggtaattttggtaattcttatgtttcttggtttgcttattggggtcaaggtactttagttactgtttcttct

SEQ ID NO: 826 - protein, 9 aa, synthetic construct
  REGION 1..9: note = Synthetic
TGAVTTSNY

SEQ ID NO: 827 - skipped

SEQ ID NO: 828 - protein, 9 aa, synthetic construct
  REGION 1..9: note = Synthetic
ALWYSNLWV

SEQ ID NO: 829 - protein, 110 aa, synthetic construct; identical to SEQ ID NO: 669
  REGION 1..110: note = Synthetic

SEQ ID NO: 830 - DNA, 330 bp, synthetic construct; identical to SEQ ID NO: 670
  misc_feature 1..330: note = Synthetic
  source 1..330: mol_type = other DNA

SEQ ID NO: 831 - protein, 8 aa, synthetic construct
  REGION 1..8: note = Synthetic
GFTFNTYA

SEQ ID NO: 832 - protein, 10 aa, synthetic construct
  REGION 1..10: note = Synthetic
IRSKGNNYAT

SEQ ID NO: 833 - protein, 16 aa, synthetic construct
  REGION 1..16: note = Synthetic
VRHGNFGNSYVSWFAY

SEQ ID NO: 834 - protein, 125 aa, synthetic construct
  REGION 1..125: note = Synthetic
EVQLVESGGGLVQPGGSLRLSCAASGFTFNTYAMNWVRQAPGKGLEWVGRIRSKGNNYATYYADSVKGRFTISRDDSKNTLYLQMNSLRAEDTAVYYCVRHGNFGNSYVSWFAYWGQGTLVTVSS

SEQ ID NO: 835 - DNA, 375 bp, synthetic construct
  misc_feature 1..375: note = Synthetic
  source 1..375: mol_type = other DNA
gaagttcaattagttgaatctggtggtggtttagttcaacctggtggttctttacgtttatcttgtgctgcttctggttttacttttaatacttatgctatgaattgggttcgtcaagctcctggtaaaggtttagaatgggttggtcgtattcgttctaaaggtaataattatgctacttattatgctgattctgttaaaggtcgttttactatttctcgtgatgattctaaaaatactttatatttacaaatgaattctttacgtgctgaagatactgctgtttattattgtgttcgtcatggtaattttggtaattcttatgtttcttggtttgcttattggggtcaaggtactttagttactgtttcttct

SEQ ID NO: 836 - protein, 9 aa, synthetic construct
  REGION 1..9: note = Synthetic
TGAVTTSNY

SEQ ID NO: 837 - skipped

SEQ ID NO: 838 - protein, 9 aa, synthetic construct
  REGION 1..9: note = Synthetic
ALWYSNLWV

SEQ ID NO: 839 - protein, 110 aa, synthetic construct; identical to SEQ ID NO: 669
  REGION 1..110: note = Synthetic

SEQ ID NO: 840 - DNA, 330 bp, synthetic construct; identical to SEQ ID NO: 670
  misc_feature 1..330: note = Synthetic
  source 1..330: mol_type = other DNA

SEQ ID NO: 841 - protein, 8 aa, synthetic construct
  REGION 1..8: note = Synthetic
GFTFNTYA

SEQ ID NO: 842 - protein, 10 aa, synthetic construct
  REGION 1..10: note = Synthetic
IRTKSNNYAV

SEQ ID NO: 843 - protein, 16 aa, synthetic construct
  REGION 1..16: note = Synthetic
VRHGNFGNSYVSWFAY

SEQ ID NO: 844 - protein, 125 aa, synthetic construct
  REGION 1..125: note = Synthetic
EVQLVESGGGLVQPGGSLRLSCAASGFTFNTYAMNWVRQAPGKGLEWVGRIRTKSNNYAVYYADSVKGRFTISRDDSKNTLYLQMNSLRAEDTAVYYCVRHGNFGNSYVSWFAYWGQGTLVTVSS

SEQ ID NO: 845 - DNA, 375 bp, synthetic construct
  misc_feature 1..375: note = Synthetic
  source 1..375: mol_type = other DNA
gaagttcaattagttgaatctggtggtggtttagttcaacctggtggttctttacgtttatcttgtgctgcttctggttttacttttaatacttatgctatgaattgggttcgtcaagctcctggtaaaggtttagaatgggttggtcgtattcgtactaaatctaataattatgctgtttattatgctgattctgttaaaggtcgttttactatttctcgtgatgattctaaaaatactttatatttacaaatgaattctttacgtgctgaagatactgctgtttattattgtgttcgtcatggtaattttggtaattcttatgtttcttggtttgcttattggggtcaaggtactttagttactgtttcttct

SEQ ID NO: 846 - protein, 9 aa, synthetic construct
  REGION 1..9: note = Synthetic
TGAVTTSNY

SEQ ID NO: 847 - skipped

SEQ ID NO: 848 - protein, 9 aa, synthetic construct
  REGION 1..9: note = Synthetic
ALWYSNLWV

SEQ ID NO: 849 - protein, 110 aa, synthetic construct; identical to SEQ ID NO: 669
  REGION 1..110: note = Synthetic

SEQ ID NO: 850 - DNA, 330 bp, synthetic construct; identical to SEQ ID NO: 670
  misc_feature 1..330: note = Synthetic
  source 1..330: mol_type = other DNA

SEQ ID NO: 851 - protein, 8 aa, synthetic construct
  REGION 1..8: note = Synthetic
GFTFNTYA

SEQ ID NO: 852 - protein, 10 aa, synthetic construct
  REGION 1..10: note = Synthetic
IKTKHDNYAT

SEQ ID NO: 853 - protein, 16 aa, synthetic construct
  REGION 1..16: note = Synthetic
VRHGNFGNSYVSWFAY

SEQ ID NO: 854 - protein, 125 aa, synthetic construct
  REGION 1..125: note = Synthetic
EVQLVESGGGLVQPGGSLRLSCAASGFTFNTYAMNWVRQAPGKGLEWVGRIKTKHDNYATYYADSVKGRFTISRDDSKNTLYLQMNSLRAEDTAVYYCVRHGNFGNSYVSWFAYWGQGTLVTVSS

SEQ ID NO: 855 - DNA, 375 bp, synthetic construct
  misc_feature 1..375: note = Synthetic
  source 1..375: mol_type = other DNA
gaagttcaattagttgaatctggtggtggtttagttcaacctggtggttctttacgtttatcttgtgctgcttctggttttacttttaatacttatgctatgaattgggttcgtcaagctcctggtaaaggtttagaatgggttggtcgtattaaaactaaacatgataattatgctacttattatgctgattctgttaaaggtcgttttactatttctcgtgatgattctaaaaatactttatatttacaaatgaattctttacgtgctgaagatactgctgtttattattgtgttcgtcatggtaattttggtaattcttatgtttcttggtttgcttattggggtcaaggtactttagttactgtttcttct

SEQ ID NO: 856 - protein, 9 aa, synthetic construct
  REGION 1..9: note = Synthetic
TGAVTTSNY

SEQ ID NO: 857 - skipped

SEQ ID NO: 858 - protein, 9 aa, synthetic construct
  REGION 1..9: note = Synthetic
ALWYSNLWV

SEQ ID NO: 859 - protein, 110 aa, synthetic construct; identical to SEQ ID NO: 669
  REGION 1..110: note = Synthetic

SEQ ID NO: 860 - DNA, 330 bp, synthetic construct; identical to SEQ ID NO: 670
  misc_feature 1..330: note = Synthetic
  source 1..330: mol_type = other DNA

SEQ ID NO: 861 - protein, 8 aa, synthetic construct
  REGION 1..8: note = Synthetic
GFTFNTYA

SEQ ID NO: 862 - protein, 10 aa, synthetic construct
  REGION 1..10: note = Synthetic
IRSKNFNYAT

SEQ ID NO: 863 - protein, 16 aa, synthetic construct
  REGION 1..16: note = Synthetic
VRHGNFGNSYVSWFAY

SEQ ID NO: 864 - protein, 125 aa, synthetic construct
  REGION 1..125: note = Synthetic
EVQLVESGGGLVQPGGSLRLSCAASGFTFNTYAMNWVRQAPGKGLEWVGRIRSKNFNYATYYADSVKGRFTISRDDSKNTLYLQMNSLRAEDTAVYYCVRHGNFGNSYVSWFAYWGQGTLVTVSS

SEQ ID NO: 865 - DNA, 375 bp, synthetic construct
  misc_feature 1..375: note = Synthetic
  source 1..375: mol_type = other DNA
gaagttcaattagttgaatctggtggtggtttagttcaacctggtggttctttacgtttatcttgtgctgcttctggttttacttttaatacttatgctatgaattgggttcgtcaagctcctggtaaaggtttagaatgggttggtcgtattcgttctaaaaattttaattatgctacttattatgctgattctgttaaaggtcgttttactatttctcgtgatgattctaaaaatactttatatttacaaatgaattctttacgtgctgaagatactgctgtttattattgtgttcgtcatggtaattttggtaattcttatgtttcttggtttgcttattggggtcaaggtactttagttactgtttcttct

SEQ ID NO: 866 - protein, 9 aa, synthetic construct
  REGION 1..9: note = Synthetic
TGAVTTSNY

SEQ ID NO: 867 - skipped

SEQ ID NO: 868 - protein, 9 aa, synthetic construct
  REGION 1..9: note = Synthetic
ALWYSNLWV

SEQ ID NO: 869 - protein, 110 aa, synthetic construct; identical to SEQ ID NO: 669
  REGION 1..110: note = Synthetic

SEQ ID NO: 870 - DNA, 330 bp, synthetic construct; identical to SEQ ID NO: 670
  misc_feature 1..330: note = Synthetic
  source 1..330: mol_type = other DNA

SEQ ID NO: 871 - protein, 8 aa, synthetic construct
  REGION 1..8: note = Synthetic
GFTFNTYA

SEQ ID NO: 872 - protein, 10 aa, synthetic construct
  REGION 1..10: note = Synthetic
VRSKQTNYAT

SEQ ID NO: 873 - protein, 16 aa, synthetic construct
  REGION 1..16: note = Synthetic
VRHGNFGNSYVSWFAY

SEQ ID NO: 874 - protein, 125 aa, synthetic construct
  REGION 1..125: note = Synthetic
EVQLVESGGGLVQPGGSLRLSCAASGFTFNTYAMNWVRQAPGKGLEWVGRVRSKQTNYATYYADSVKGRFTISRDDSKNTLYLQMNSLRAEDTAVYYCVRHGNFGNSYVSWFAYWGQGTLVTVSS

SEQ ID NO: 875 - DNA, 375 bp, synthetic construct
  misc_feature 1..375: note = Synthetic
  source 1..375: mol_type = other DNA
gaagttcaattagttgaatctggtggtggtttagttcaacctggtggttctttacgtttatcttgtgctgcttctggttttacttttaatacttatgctatgaattgggttcgtcaagctcctggtaaaggtttagaatgggttggtcgtgttcgttctaaacaaactaattatgctacttattatgctgattctgttaaaggtcgttttactatttctcgtgatgattctaaaaatactttatatttacaaatgaattctttacgtgctgaagatactgctgtttattattgtgttcgtcatggtaattttggtaattcttatgtttcttggtttgcttattggggtcaaggtactttagttactgtttcttct

SEQ ID NO: 876 - protein, 9 aa, synthetic construct
  REGION 1..9: note = Synthetic
TGAVTTSNY

SEQ ID NO: 877 - skipped

SEQ ID NO: 878 - protein, 9 aa, synthetic construct
  REGION 1..9: note = Synthetic
ALWYSNLWV

SEQ ID NO: 879 - protein, 110 aa, synthetic construct; identical to SEQ ID NO: 669
  REGION 1..110: note = Synthetic

SEQ ID NO: 880 - DNA, 330 bp, synthetic construct; identical to SEQ ID NO: 670
  misc_feature 1..330: note = Synthetic
  source 1..330: mol_type = other DNA

SEQ ID NO: 881 - protein, 8 aa, synthetic construct
  REGION 1..8: note = Synthetic
GFTFNTYA

SEQ ID NO: 882 - protein, 10 aa, synthetic construct
  REGION 1..10: note = Synthetic
IRSKHNNYET

SEQ ID NO: 883 - protein, 16 aa, synthetic construct
  REGION 1..16: note = Synthetic
VRHGNFGNSYVSWFAY

SEQ ID NO: 884 - protein, 125 aa, synthetic construct
  REGION 1..125: note = Synthetic
EVQLVESGGGLVQPGGSLRLSCAASGFTFNTYAMNWVRQAPGKGLEWVGRIRSKHNNYETYYADSVKGRFTISRDDSKNTLYLQMNSLRAEDTAVYYCVRHGNFGNSYVSWFAYWGQGTLVTVSS

SEQ ID NO: 885 - DNA, 375 bp, synthetic construct
  misc_feature 1..375: note = Synthetic
  source 1..375: mol_type = other DNA
gaagttcaattagttgaatctggtggtggtttagttcaacctggtggttctttacgtttatcttgtgctgcttctggttttacttttaatacttatgctatgaattgggttcgtcaagctcctggtaaaggtttagaatgggttggtcgtattcgttctaaacataataattatgaaacttattatgctgattctgttaaaggtcgttttactatttctcgtgatgattctaaaaatactttatatttacaaatgaattctttacgtgctgaagatactgctgtttattattgtgttcgtcatggtaattttggtaattcttatgtttcttggtttgcttattggggtcaaggtactttagttactgtttcttct

SEQ ID NO: 886 - protein, 9 aa, synthetic construct
  REGION 1..9: note = Synthetic
TGAVTTSNY

SEQ ID NO: 887 - skipped

SEQ ID NO: 888 - protein, 9 aa, synthetic construct
  REGION 1..9: note = Synthetic
ALWYSNLWV

SEQ ID NO: 889 - protein, 110 aa, synthetic construct; identical to SEQ ID NO: 669
  REGION 1..110: note = Synthetic

SEQ ID NO: 890 - DNA, 330 bp, synthetic construct; identical to SEQ ID NO: 670
  misc_feature 1..330: note = Synthetic
  source 1..330: mol_type = other DNA

SEQ ID NO: 891 - protein, 8 aa, synthetic construct
  REGION 1..8: note = Synthetic
GFTFNTYA

SEQ ID NO: 892 - protein, 10 aa, synthetic construct
  REGION 1..10: note = Synthetic
IRSYINNYAT

SEQ ID NO: 893 - protein, 16 aa, synthetic construct
  REGION 1..16: note = Synthetic
VRHGNFGNSYVSWFAY

SEQ ID NO: 894 - protein, 125 aa, synthetic construct
  REGION 1..125: note = Synthetic
EVQLVESGGGLVQPGGSLRLSCAASGFTFNTYAMNWVRQAPGKGLEWVGRIRSYINNYATYYADSVKGRFTISRDDSKNTLYLQMNSLRAEDTAVYYCVRHGNFGNSYVSWFAYWGQGTLVTVSS

SEQ ID NO: 895 - DNA, 375 bp, synthetic construct
  misc_feature 1..375: note = Synthetic
  source 1..375: mol_type = other DNA
gaagttcaattagttgaatctggtggtggtttagttcaacctggtggttctttacgtttatcttgtgctgcttctggttttacttttaatacttatgctatgaattgggttcgtcaagctcctggtaaaggtttagaatgggttggtcgtattcgttcttatattaataattatgctacttattatgctgattctgttaaaggtcgttttactatttctcgtgatgattctaaaaatactttatatttacaaatgaattctttacgtgctgaagatactgctgtttattattgtgttcgtcatggtaattttggtaattcttatgtttcttggtttgcttattggggtcaaggtactttagttactgtttcttct

SEQ ID NO: 896 - protein, 9 aa, synthetic construct
  REGION 1..9: note = Synthetic
TGAVTTSNY

SEQ ID NO: 897 - skipped

SEQ ID NO: 898 - protein, 9 aa, synthetic construct
  REGION 1..9: note = Synthetic
ALWYSNLWV

SEQ ID NO: 899 - protein, 110 aa, synthetic construct; identical to SEQ ID NO: 669
  REGION 1..110: note = Synthetic

SEQ ID NO: 900 - DNA, 330 bp, synthetic construct; identical to SEQ ID NO: 670
  misc_feature 1..330: note = Synthetic
  source 1..330: mol_type = other DNA

SEQ ID NO: 901 - protein, 8 aa, synthetic construct
  REGION 1..8: note = Synthetic
GFTFNTYA

SEQ ID NO: 902 - protein, 10 aa, synthetic construct
  REGION 1..10: note = Synthetic
IRSKVRNYAT

SEQ ID NO: 903 - protein, 16 aa, synthetic construct
  REGION 1..16: note = Synthetic
VRHGNFGNSYVSWFAY

SEQ ID NO: 904 - protein, 125 aa, synthetic construct
  REGION 1..125: note = Synthetic
EVQLVESGGGLVQPGGSLRLSCAASGFTFNTYAMNWVRQAPGKGLEWVGRIRSKVRNYATYYADSVKGRFTISRDDSKNTLYLQMNSLRAEDTAVYYCVRHGNFGNSYVSWFAYWGQGTLVTVSS

SEQ ID NO: 905 - DNA, 375 bp, synthetic construct
  misc_feature 1..375: note = Synthetic
  source 1..375: mol_type = other DNA
gaagttcaattagttgaatctggtggtggtttagttcaacctggtggttctttacgtttatcttgtgctgcttctggttttacttttaatacttatgctatgaattgggttcgtcaagctcctggtaaaggtttagaatgggttggtcgtattcgttctaaagttcgtaattatgctacttattatgctgattctgttaaaggtcgttttactatttctcgtgatgattctaaaaatactttatatttacaaatgaattctttacgtgctgaagatactgctgtttattattgtgttcgtcatggtaattttggtaattcttatgtttcttggtttgcttattggggtcaaggtactttagttactgtttcttct

SEQ ID NO: 906 - protein, 9 aa, synthetic construct
  REGION 1..9: note = Synthetic
TGAVTTSNY

SEQ ID NO: 907 - skipped

SEQ ID NO: 908 - protein, 9 aa, synthetic construct
  REGION 1..9: note = Synthetic
ALWYSNLWV

SEQ ID NO: 909 - protein, 110 aa, synthetic construct; identical to SEQ ID NO: 669
  REGION 1..110: note = Synthetic

SEQ ID NO: 910 - DNA, 330 bp, synthetic construct; identical to SEQ ID NO: 670
  misc_feature 1..330: note = Synthetic
  source 1..330: mol_type = other DNA

SEQ ID NO: 911 - protein, 8 aa, synthetic construct
  REGION 1..8: note = Synthetic
GFTFNTYA

SEQ ID NO: 912 - protein, 10 aa, synthetic construct
  REGION 1..10: note = Synthetic
VRSKVNNYAT

SEQ ID NO: 913 - protein, 16 aa, synthetic construct
  REGION 1..16: note = Synthetic
VRHGNFGNSYVSWFAY

SEQ ID NO: 914 - protein, 125 aa, synthetic construct
  REGION 1..125: note = Synthetic
EVQLVESGGGLVQPGGSLRLSCAASGFTFNTYAMNWVRQAPGKGLEWVGRVRSKVNNYATYYADSVKGRFTISRDDSKNTLYLQMNSLRAEDTAVYYCVRHGNFGNSYVSWFAYWGQGTLVTVSS

SEQ ID NO: 915 - DNA, 375 bp, synthetic construct
  misc_feature 1..375: note = Synthetic
  source 1..375: mol_type = other DNA
gaagttcaattagttgaatctggtggtggtttagttcaacctggtggttctttacgtttatcttgtgctgcttctggttttacttttaatacttatgctatgaattgggttcgtcaagctcctggtaaaggtttagaatgggttggtcgtgttcgttctaaagttaataattatgctacttattatgctgattctgttaaaggtcgttttactatttctcgtgatgattctaaaaatactttatatttacaaatgaattctttacgtgctgaagatactgctgtttattattgtgttcgtcatggtaattttggtaattcttatgtttcttggtttgcttattggggtcaaggtactttagttactgtttcttct

SEQ ID NO: 916 - protein, 9 aa, synthetic construct
  REGION 1..9: note = Synthetic
TGAVTTSNY

SEQ ID NO: 917 - skipped

SEQ ID NO: 918 - protein, 9 aa, synthetic construct
  REGION 1..9: note = Synthetic
ALWYSNLWV

SEQ ID NO: 919 - protein, 110 aa, synthetic construct; identical to SEQ ID NO: 669
  REGION 1..110: note = Synthetic

SEQ ID NO: 920 - DNA, 330 bp, synthetic construct; identical to SEQ ID NO: 670
  misc_feature 1..330: note = Synthetic
  source 1..330: mol_type = other DNA

SEQ ID NO: 921 - protein, 8 aa, synthetic construct
  REGION 1..8: note = Synthetic
GFTFNTYA

SEQ ID NO: 922 - protein, 10 aa, synthetic construct
  REGION 1..10: note = Synthetic
IRSKSGNYAT

SEQ ID NO: 923 - protein, 16 aa, synthetic construct
  REGION 1..16: note = Synthetic
VRHGNFGNSYVSWFAY

SEQ ID NO: 924 - protein, 125 aa, synthetic construct
  REGION 1..125: note = Synthetic
EVQLVESGGGLVQPGGSLRLSCAASGFTFNTYAMNWVRQAPGKGLEWVGRIRSKSGNYATYYADSVKGRFTISRDDSKNTLYLQMNSLRAEDTAVYYCVRHGNFGNSYVSWFAYWGQGTLVTVSS

SEQ ID NO: 925 - DNA, 375 bp, synthetic construct
  misc_feature 1..375: note = Synthetic
  source 1..375: mol_type = other DNA
gaagttcaattagttgaatctggtggtggtttagttcaacctggtggttctttacgtttatcttgtgctgcttctggttttacttttaatacttatgctatgaattgggttcgtcaagctcctggtaaaggtttagaatgggttggtcgtattcgttctaaatctggtaattatgctacttattatgctgattctgttaaaggtcgttttactatttctcgtgatgattctaaaaatactttatatttacaaatgaattctttacgtgctgaagatactgctgtttattattgtgttcgtcatggtaattttggtaattcttatgtttcttggtttgcttattggggtcaaggtactttagttactgtttcttct

SEQ ID NO: 926 - protein, 9 aa, synthetic construct
  REGION 1..9: note = Synthetic
TGAVTTSNY

SEQ ID NO: 927 - skipped

SEQ ID NO: 928 - protein, 9 aa, synthetic construct
  REGION 1..9: note = Synthetic
ALWYSNLWV

SEQ ID NO: 929 - protein, 110 aa, synthetic construct; identical to SEQ ID NO: 669
  REGION 1..110: note = Synthetic

SEQ ID NO: 930 - DNA, 330 bp, synthetic construct; identical to SEQ ID NO: 670
  misc_feature 1..330: note = Synthetic
  source 1..330: mol_type = other DNA

SEQ ID NO: 931 - protein, 8 aa, synthetic construct
  REGION 1..8: note = Synthetic
GFTFNTYA

SEQ ID NO: 932 - protein, 10 aa, synthetic construct
  REGION 1..10: note = Synthetic
IRSKPNEYAT

SEQ ID NO: 933 - protein, 16 aa, synthetic construct
  REGION 1..16: note = Synthetic
VRHGNFGNSYVSWFAY

SEQ ID NO: 934 - protein, 125 aa, synthetic construct
  REGION 1..125: note = Synthetic
EVQLVESGGGLVQPGGSLRLSCAASGFTFNTYAMNWVRQAPGKGLEWVGRIRSKPNEYATYYADSVKGRFTISRDDSKNTLYLQMNSLRAEDTAVYYCVRHGNFGNSYVSWFAYWGQGTLVTVSS

SEQ ID NO: 935 - DNA, 375 bp, synthetic construct
  misc_feature 1..375: note = Synthetic
  source 1..375: mol_type = other DNA
gaagttcaattagttgaatctggtggtggtttagttcaacctggtggttctttacgtttatcttgtgctgcttctggttttacttttaatacttatgctatgaattgggttcgtcaagctcctggtaaaggtttagaatgggttggtcgtattcgttctaaacctaatgaatatgctacttattatgctgattctgttaaaggtcgttttactatttctcgtgatgattctaaaaatactttatatttacaaatgaattctttacgtgctgaagatactgctgtttattattgtgttcgtcatggtaattttggtaattcttatgtttcttggtttgcttattggggtcaaggtactttagttactgtttcttct

SEQ ID NO: 936 - protein, 9 aa, synthetic construct
  REGION 1..9: note = Synthetic
TGAVTTSNY

SEQ ID NO: 937 - skipped

SEQ ID NO: 938 - protein, 9 aa, synthetic construct
  REGION 1..9: note = Synthetic
ALWYSNLWV

SEQ ID NO: 939 - protein, 110 aa, synthetic construct; identical to SEQ ID NO: 669
  REGION 1..110: note = Synthetic

SEQ ID NO: 940 - DNA, 330 bp, synthetic construct; identical to SEQ ID NO: 670
  misc_feature 1..330: note = Synthetic
  source 1..330: mol_type = other DNA

SEQ ID NO: 941 - protein, 8 aa, synthetic construct
  REGION 1..8: note = Synthetic
GFTFNTYA

SEQ ID NO: 942 - protein, 10 aa, synthetic construct
  REGION 1..10: note = Synthetic
IRSKFKNYAT

SEQ ID NO: 943 - protein, 16 aa, synthetic construct
  REGION 1..16: note = Synthetic
VRHGNFGNSYVSWFAY

SEQ ID NO: 944 - protein, 125 aa, synthetic construct
  REGION 1..125: note = Synthetic
EVQLVESGGGLVQPGGSLRLSCAASGFTFNTYAMNWVRQAPGKGLEWVGRIRSKFKNYATYYADSVKGRFTISRDDSKNTLYLQMNSLRAEDTAVYYCVRHGNFGNSYVSWFAYWGQGTLVTVSS

SEQ ID NO: 945 - DNA, 375 bp, synthetic construct
  misc_feature 1..375: note = Synthetic
  source 1..375: mol_type = other DNA
gaagttcaattagttgaatctggtggtggtttagttcaacctggtggttctttacgtttatcttgtgctgcttctggttttacttttaatacttatgctatgaattgggttcgtcaagctcctggtaaaggtttagaatgggttggtcgtattcgttctaaatttaaaaattatgctacttattatgctgattctgttaaaggtcgttttactatttctcgtgatgattctaaaaatactttatatttacaaatgaattctttacgtgctgaagatactgctgtttattattgtgttcgtcatggtaattttggtaattcttatgtttcttggtttgcttattggggtcaaggtactttagttactgtttcttct

SEQ ID NO: 946 - protein, 9 aa, synthetic construct
  REGION 1..9: note = Synthetic
TGAVTTSNY

SEQ ID NO: 947 - skipped

SEQ ID NO: 948 - protein, 9 aa, synthetic construct
  REGION 1..9: note = Synthetic
ALWYSNLWV

SEQ ID NO: 949 - protein, 110 aa, synthetic construct; identical to SEQ ID NO: 669
  REGION 1..110: note = Synthetic

SEQ ID NO: 950 - DNA, 330 bp, synthetic construct; identical to SEQ ID NO: 670
  misc_feature 1..330: note = Synthetic
  source 1..330: mol_type = other DNA

SEQ ID NO: 951 - protein, 8 aa, synthetic construct
  REGION 1..8: note = Synthetic
GFTFNTYA

SEQ ID NO: 952 - protein, 10 aa, synthetic construct
  REGION 1..10: note = Synthetic
IRSKYTNYAT

SEQ ID NO: 953 - protein, 16 aa, synthetic construct
  REGION 1..16: note = Synthetic
VRHGNFGNSYVSWFAY

SEQ ID NO: 954 - protein, 125 aa, synthetic construct
  REGION 1..125: note = Synthetic
EVQLVESGGGLVQPGGSLRLSCAASGFTFNTYAMNWVRQAPGKGLEWVGRIRSKYTNYATYYADSVKGRFTISRDDSKNTLYLQMNSLRAEDTAVYYCVRHGNFGNSYVSWFAYWGQGTLVTVSS

SEQ ID NO: 955 - DNA, 375 bp, synthetic construct
  misc_feature 1..375: note = Synthetic
  source 1..375: mol_type = other DNA
gaagttcaattagttgaatctggtggtggtttagttcaacctggtggttctttacgtttatcttgtgctgcttctggttttacttttaatacttatgctatgaattgggttcgtcaagctcctggtaaaggtttagaatgggttggtcgtattcgttctaaatatactaattatgctacttattatgctgattctgttaaaggtcgttttactatttctcgtgatgattctaaaaatactttatatttacaaatgaattctttacgtgctgaagatactgctgtttattattgtgttcgtcatggtaattttggtaattcttatgtttcttggtttgcttattggggtcaaggtactttagttactgtttcttct

SEQ ID NO: 956 - protein, 9 aa, synthetic construct
  REGION 1..9: note = Synthetic
TGAVTTSNY

SEQ ID NO: 957 - skipped

SEQ ID NO: 958 - protein, 9 aa, synthetic construct
  REGION 1..9: note = Synthetic
ALWYSNLWV

SEQ ID NO: 959 - protein, 110 aa, synthetic construct; identical to SEQ ID NO: 669
  REGION 1..110: note = Synthetic

SEQ ID NO: 960 - DNA, 330 bp, synthetic construct; identical to SEQ ID NO: 670
  misc_feature 1..330: note = Synthetic
  source 1..330: mol_type = other DNA

SEQ ID NO: 961 - protein, 8 aa, synthetic construct
  REGION 1..8: note = Synthetic
GFTFNTYA

SEQ ID NO: 962 - protein, 10 aa, synthetic construct
  REGION 1..10: note = Synthetic
IRSQYNNYAT

SEQ ID NO: 963 - protein, 16 aa, synthetic construct
  REGION 1..16: note = Synthetic
VRHGNFGNSYVSWFAY

SEQ ID NO: 964 - protein, 125 aa, synthetic construct
  REGION 1..125: note = Synthetic
EVQLVESGGGLVQPGGSLRLSCAASGFTFNTYAMNWVRQAPGKGLEWVGRIRSQYNNYATYYADSVKGRFTISRDDSKNTLYLQMNSLRAEDTAVYYCVRHGNFGNSYVSWFAYWGQGTLVTVSS

SEQ ID NO: 965 - DNA, 375 bp, synthetic construct
  misc_feature 1..375: note = Synthetic
  source 1..375: mol_type = other DNA
gaagttcaattagttgaatctggtggtggtttagttcaacctggtggttctttacgtttatcttgtgctgcttctggttttacttttaatacttatgctatgaattgggttcgtcaagctcctggtaaaggtttagaatgggttggtcgtattcgttctcaatataataattatgctacttattatgctgattctgttaaaggtcgttttactatttctcgtgatgattctaaaaatactttatatttacaaatgaattctttacgtgctgaagatactgctgtttattattgtgttcgtcatggtaattttggtaattcttatgtttcttggtttgcttattggggtcaaggtactttagttactgtttcttct

SEQ ID NO: 966 - protein, 9 aa, synthetic construct
  REGION 1..9: note = Synthetic
TGAVTTSNY

SEQ ID NO: 967 - skipped

SEQ ID NO: 968 - protein, 9 aa, synthetic construct
  REGION 1..9: note = Synthetic
ALWYSNLWV

SEQ ID NO: 969 - protein, 110 aa, synthetic construct; identical to SEQ ID NO: 669
  REGION 1..110: note = Synthetic

SEQ ID NO: 970 - DNA, 330 bp, synthetic construct; identical to SEQ ID NO: 670
  misc_feature 1..330: note = Synthetic
  source 1..330: mol_type = other DNA

SEQ ID NO: 971 - protein, 8 aa, synthetic construct
  REGION 1..8: note = Synthetic
GFTFNTYA

SEQ ID NO: 972 - protein, 10 aa, synthetic construct
  REGION 1..10: note = Synthetic
IRSKYHNYAT

SEQ ID NO: 973 - protein, 16 aa, synthetic construct
  REGION 1..16: note = Synthetic
VRHGNFGNSYVSWFAY

SEQ ID NO: 974 - protein, 125 aa, synthetic construct
  REGION 1..125: note = Synthetic
EVQLVESGGGLVQPGGSLRLSCAASGFTFNTYAMNWVRQAPGKGLEWVGRIRSKYHNYATYYADSVKGRFTISRDDSKNTLYLQMNSLRAEDTAVYYCVRHGNFGNSYVSWFAYWGQGTLVTVSS

SEQ ID NO: 975 - DNA, 375 bp, synthetic construct
  misc_feature 1..375: note = Synthetic
  source 1..375: mol_type = other DNA
gaagttcaattagttgaatctggtggtggtttagttcaacctggtggttctttacgtttatcttgtgctgcttctggttttacttttaatacttatgctatgaattgggttcgtcaagctcctggtaaaggtttagaatgggttggtcgtattcgttctaaatatcataattatgctacttattatgctgattctgttaaaggtcgttttactatttctcgtgatgattctaaaaatactttatatttacaaatgaattctttacgtgctgaagatactgctgtttattattgtgttcgtcatggtaattttggtaattcttatgtttcttggtttgcttattggggtcaaggtactttagttactgtttcttct

SEQ ID NO: 976 - protein, 9 aa, synthetic construct
  REGION 1..9: note = Synthetic
TGAVTTSNY

SEQ ID NO: 977 - skipped

SEQ ID NO: 978 - protein, 9 aa, synthetic construct
  REGION 1..9: note = Synthetic
ALWYSNLWV

SEQ ID NO: 979 - protein, 110 aa, synthetic construct; identical to SEQ ID NO: 669
  REGION 1..110: note = Synthetic

SEQ ID NO: 980 - DNA, 330 bp, synthetic construct; identical to SEQ ID NO: 670
  misc_feature 1..330: note = Synthetic
  source 1..330: mol_type = other DNA

SEQ ID NO: 981 - protein, 8 aa, synthetic construct
  REGION 1..8: note = Synthetic
GFTFNTYA

SEQ ID NO: 982 - protein, 10 aa, synthetic construct
  REGION 1..10: note = Synthetic
IRSKVNNYAT

SEQ ID NO: 983 - protein, 16 aa, synthetic construct
  REGION 1..16: note = Synthetic
VRHGNFGNSYVSWFAY

SEQ ID NO: 984 - protein, 125 aa, synthetic construct
  REGION 1..125: note = Synthetic
EVQLVESGGGLVQPGGSLRLSCAASGFTFNTYAMNWVRQAPGKGLEWVGRIRSKVNNYATYYADSVKGRFTISRDDSKNTLYLQMNSLRAEDTAVYYCVRHGNFGNSYVSWFAYWGQGTLVTVSS

SEQ ID NO: 985 - DNA, 375 bp, synthetic construct
  misc_feature 1..375: note = Synthetic
  source 1..375: mol_type = other DNA
gaagttcaattagttgaatctggtggtggtttagttcaacctggtggttctttacgtttatcttgtgctgcttctggttttacttttaatacttatgctatgaattgggttcgtcaagctcctggtaaaggtttagaatgggttggtcgtattcgttctaaagttaataattatgctacttattatgctgattctgttaaaggtcgttttactatttctcgtgatgattctaaaaatactttatatttacaaatgaattctttacgtgctgaagatactgctgtttattattgtgttcgtcatggtaattttggtaattcttatgtttcttggtttgcttattggggtcaaggtactttagttactgtttcttct

SEQ ID NO: 986 - protein, 9 aa, synthetic construct
  REGION 1..9: note = Synthetic
TGAVTTSNY

SEQ ID NO: 987 - skipped

SEQ ID NO: 988 - protein, 9 aa, synthetic construct
  REGION 1..9: note = Synthetic
ALWYSNLWV

SEQ ID NO: 989 - protein, 110 aa, synthetic construct; identical to SEQ ID NO: 669
  REGION 1..110: note = Synthetic

SEQ ID NO: 990 - DNA, 330 bp, synthetic construct; identical to SEQ ID NO: 670
  misc_feature 1..330: note = Synthetic
  source 1..330: mol_type = other DNA

SEQ ID NO: 991 - protein, 8 aa, synthetic construct
  REGION 1..8: note = Synthetic
GFTFNTYA

SEQ ID NO: 992 - protein, 10 aa, synthetic construct
  REGION 1..10: note = Synthetic
IRSSNNNYAT

SEQ ID NO: 993 - protein, 16 aa, synthetic construct
  REGION 1..16: note = Synthetic
VRHGNFGNSYVSWFAY

SEQ ID NO: 994 - protein, 125 aa, synthetic construct
  REGION 1..125: note = Synthetic
EVQLVESGGGLVQPGGSLRLSCAASGFTFNTYAMNWVRQAPGKGLEWVGRIRSSNNNYATYYADSVKGRFTISRDDSKNTLYLQMNSLRAEDTAVYYCVRHGNFGNSYVSWFAYWGQGTLVTVSS

SEQ ID NO: 995 - DNA, 375 bp, synthetic construct
  misc_feature 1..375: note = Synthetic
  source 1..375: mol_type = other DNA
gaagttcaattagttgaatctggtggtggtttagttcaacctggtggttctttacgtttatcttgtgctgcttctggttttacttttaatacttatgctatgaattgggttcgtcaagctcctggtaaaggtttagaatgggttggtcgtattcgttcttctaataataattatgctacttattatgctgattctgttaaaggtcgttttactatttctcgtgatgattctaaaaatactttatatttacaaatgaattctttacgtgctgaagatactgctgtttattattgtgttcgtcatggtaattttggtaattcttatgtttcttggtttgcttattggggtcaaggtactttagttactgtttcttct

SEQ ID NO: 996 - protein, 9 aa, synthetic construct
  REGION 1..9: note = Synthetic
TGAVTTSNY

SEQ ID NO: 997 - skipped

SEQ ID NO: 998 - protein, 9 aa, synthetic construct
  REGION 1..9: note = Synthetic
ALWYSNLWV

SEQ ID NO: 999 - protein, 110 aa, synthetic construct; identical to SEQ ID NO: 669
  REGION 1..110: note = Synthetic

SEQ ID NO: 1000 - DNA, 330 bp, synthetic construct; identical to SEQ ID NO: 670
  misc_feature 1..330: note = Synthetic
  source 1..330: mol_type = other DNA

SEQ ID NO: 1001 - protein, 8 aa, synthetic construct
  REGION 1..8: note = Synthetic
GFTFNTYA

SEQ ID NO: 1002 - protein, 10 aa, synthetic construct
  REGION 1..10: note = Synthetic
IRSKYNKYAT

SEQ ID NO: 1003 - protein, 16 aa, synthetic construct
  REGION 1..16: note = Synthetic
VRHGNFGNSYVSWFAY

SEQ ID NO: 1004 - protein, 125 aa, synthetic construct
  REGION 1..125: note = Synthetic
EVQLVESGGGLVQPGGSLRLSCAASGFTFNTYAMNWVRQAPGKGLEWVGRIRSKYNKYATYYADSVKGRFTISRDDSKNTLYLQMNSLRAEDTAVYYCVRHGNFGNSYVSWFAYWGQGTLVTVSS

SEQ ID NO: 1005 - DNA, 375 bp, synthetic construct
  misc_feature 1..375: note = Synthetic
  source 1..375: mol_type = other DNA
gaagttcaattagttgaatctggtggtggtttagttcaacctggtggttctttacgtttatcttgtgctgcttctggttttacttttaatacttatgctatgaattgggttcgtcaagctcctggtaaaggtttagaatgggttggtcgtattcgttctaaatataataaatatgctacttattatgctgattctgttaaaggtcgttttactatttctcgtgatgattctaaaaatactttatatttacaaatgaattctttacgtgctgaagatactgctgtttattattgtgttcgtcatggtaattttggtaattcttatgtttcttggtttgcttattggggtcaaggtactttagttactgtttcttct

SEQ ID NO: 1006 - protein, 9 aa, synthetic construct
  REGION 1..9: note = Synthetic
TGAVTTSNY

SEQ ID NO: 1007 - skipped

SEQ ID NO: 1008 - protein, 9 aa, synthetic construct
  REGION 1..9: note = Synthetic
ALWYSNLWV

SEQ ID NO: 1009 - protein, 110 aa, synthetic construct; identical to SEQ ID NO: 669
  REGION 1..110: note = Synthetic

SEQ ID NO: 1010 - DNA, 330 bp, synthetic construct; identical to SEQ ID NO: 670
  misc_feature 1..330: note = Synthetic
  source 1..330: mol_type = other DNA

SEQ ID NO: 1011 - protein, 8 aa, synthetic construct
  REGION 1..8: note = Synthetic
GFTFNTYA

SEQ ID NO: 1012 - protein, 10 aa, synthetic construct
  REGION 1..10: note = Synthetic
VRSKASNYAT

SEQ ID NO: 1013 - protein, 16 aa, synthetic construct
  REGION 1..16: note = Synthetic
VRHGNFGNSYVSWFAY

SEQ ID NO: 1014 - protein, 125 aa, synthetic construct
  REGION 1..125: note = Synthetic
EVQLVESGGGLVQPGGSLRLSCAASGFTFNTYAMNWVRQAPGKGLEWVGRVRSKASNYATYYADSVKGRFTISRDDSKNTLYLQMNSLRAEDTAVYYCVRHGNFGNSYVSWFAYWGQGTLVTVSS

SEQ ID NO: 1015 - DNA, 375 bp, synthetic construct
  misc_feature 1..375: note = Synthetic
  source 1..375: mol_type = other DNA
gaagttcaattagttgaatctggtggtggtttagttcaacctggtggttctttacgtttatcttgtgctgcttctggttttacttttaatacttatgctatgaattgggttcgtcaagctcctggtaaaggtttagaatgggttggtcgtgttcgttctaaagcttctaattatgctacttattatgctgattctgttaaaggtcgttttactatttctcgtgatgattctaaaaatactttatatttacaaatgaattctttacgtgctgaagatactgctgtttattattgtgttcgtcatggtaattttggtaattcttatgtttcttggtttgcttattggggtcaaggtactttagttactgtttcttct

SEQ ID NO: 1016 - protein, 9 aa, synthetic construct
  REGION 1..9: note = Synthetic
TGAVTTSNY

SEQ ID NO: 1017 - skipped

SEQ ID NO: 1018 - protein, 9 aa, synthetic construct
  REGION 1..9: note = Synthetic
ALWYSNLWV

SEQ ID NO: 1019 - protein, 110 aa, synthetic construct; identical to SEQ ID NO: 669
  REGION 1..110: note = Synthetic

SEQ ID NO: 1020 - DNA, 330 bp, synthetic construct; identical to SEQ ID NO: 670
  misc_feature 1..330: note = Synthetic
  source 1..330: mol_type = other DNA

SEQ ID NO: 1021 - protein, 8 aa, synthetic construct
  REGION 1..8: note = Synthetic
GFTFNTYA

SEQ ID NO: 1022 - protein, 10 aa, synthetic construct
  REGION 1..10: note = Synthetic
IRSKSRNYAT

SEQ ID NO: 1023 - protein, 16 aa, synthetic construct
  REGION 1..16: note = Synthetic
VRHGNFGNSYVSWFAY

SEQ ID NO: 1024 - protein, 125 aa, synthetic construct
  REGION 1..125: note = Synthetic
EVQLVESGGGLVQPGGSLRLSCAASGFTFNTYAMNWVRQAPGKGLEWVGRIRSKSRNYATYYADSVKGRFTISRDDSKNTLYLQMNSLRAEDTAVYYCVRHGNFGNSYVSWFAYWGQGTLVTVSS

SEQ ID NO: 1025 - DNA, 375 bp, synthetic construct
  misc_feature 1..375: note = Synthetic
  source 1..375: mol_type = other DNA
gaagttcaattagttgaatctggtggtggtttagttcaacctggtggttctttacgtttatcttgtgctgcttctggttttacttttaatacttatgctatgaattgggttcgtcaagctcctggtaaaggtttagaatgggttggtcgtattcgttctaaatctcgtaattatgctacttattatgctgattctgttaaaggtcgttttactatttctcgtgatgattctaaaaatactttatatttacaaatgaattctttacgtgctgaagatactgctgtttattattgtgttcgtcatggtaattttggtaattcttatgtttcttggtttgcttattggggtcaaggtactttagttactgtttcttct

SEQ ID NO: 1026 - protein, 9 aa, synthetic construct
  REGION 1..9: note = Synthetic
TGAVTTSNY

SEQ ID NO: 1027 - skipped

SEQ ID NO: 1028 - protein, 9 aa, synthetic construct
  REGION 1..9: note = Synthetic
ALWYSNLWV

SEQ ID NO: 1029 - protein, 110 aa, synthetic construct; identical to SEQ ID NO: 669
  REGION 1..110: note = Synthetic

SEQ ID NO: 1030 - DNA, 330 bp, synthetic construct; identical to SEQ ID NO: 670
  misc_feature 1..330: note = Synthetic
  source 1..330: mol_type = other DNA

SEQ ID NO: 1031 - protein, 8 aa, synthetic construct
  REGION 1..8: note = Synthetic
GFTFNTYA

SEQ ID NO: 1032 - protein, 10 aa, synthetic construct
  REGION 1..10: note = Synthetic
IRSKYNNYAT

SEQ ID NO: 1033 - protein, 16 aa, synthetic construct
  REGION 1..16: note = Synthetic
VREGGSGNYYNVYFAY

SEQ ID NO: 1034 - protein, 125 aa, synthetic construct
  REGION 1..125: note = Synthetic
EVQLVESGGGLVQPGGSLRLSCAASGFTFNTYAMNWVRQAPGKGLEWVGRIRSKYNNYATYYADSVKGRFTISRDDSKNTLYLQMNSLRAEDTAVYYCVREGGSGNYYNVYFAYWGQGTLVTVSS

SEQ ID NO: 1035 - DNA, 375 bp, synthetic construct
  misc_feature 1..375: note = Synthetic
  source 1..375: mol_type = other DNA
gaagttcaattagttgaatctggtggtggtttagttcaacctggtggttctttacgtttatcttgtgctgcttctggttttacttttaatacttatgctatgaattgggttcgtcaagctcctggtaaaggtttagaatgggttggtcgtattcgttctaaatataataattatgctacttattatgctgattctgttaaaggtcgttttactatttctcgtgatgattctaaaaatactttatatttacaaatgaattctttacgtgctgaagatactgctgtttattattgtgttcgtgaaggtggttctggtaattattataatgtttattttgcttattggggtcaaggtactttagttactgtttcttct

SEQ ID NO: 1036 - protein, 9 aa, synthetic construct
  REGION 1..9: note = Synthetic
TGAVTTSNY

SEQ ID NO: 1037 - skipped

SEQ ID NO: 1038 - protein, 9 aa, synthetic construct
  REGION 1..9: note = Synthetic
ALWYSNLWV

SEQ ID NO: 1039 - protein, 110 aa, synthetic construct; identical to SEQ ID NO: 669
  REGION 1..110: note = Synthetic

SEQ ID NO: 1040 - DNA, 330 bp, synthetic construct; identical to SEQ ID NO: 670
  misc_feature 1..330: note = Synthetic
  source 1..330: mol_type = other DNA

SEQ ID NO: 1041 - protein, 8 aa, synthetic construct
  REGION 1..8: note = Synthetic
GFTFNTYA

SEQ ID NO: 1042 - protein, 10 aa, synthetic construct
  REGION 1..10: note = Synthetic
IRSKYNNYAT

SEQ ID NO: 1043 - protein, 16 aa, synthetic construct
  REGION 1..16: note = Synthetic
VRSGRFGESHVGPFAY

SEQ ID NO: 1044 - protein, 125 aa, synthetic construct
  REGION 1..125: note = Synthetic
EVQLVESGGGLVQPGGSLRLSCAASGFTFNTYAMNWVRQAPGKGLEWVGRIRSKYNNYATYYADSVKGRFTISRDDSKNTLYLQMNSLRAEDTAVYYCVRSGRFGESHVGPFAYWGQGTLVTVSS

SEQ ID NO: 1045 - DNA, 375 bp, synthetic construct
  misc_feature 1..375: note = Synthetic
  source 1..375: mol_type = other DNA
gaagttcaattagttgaatctggtggtggtttagttcaacctggtggttctttacgtttatcttgtgctgcttctggttttacttttaatacttatgctatgaattgggttcgtcaagctcctggtaaaggtttagaatgggttggtcgtattcgttctaaatataataattatgctacttattatgctgattctgttaaaggtcgttttactatttctcgtgatgattctaaaaatactttatatttacaaatgaattctttacgtgctgaagatactgctgtttattattgtgttcgttctggtcgttttggtgaatctcatgttggtccttttgcttattggggtcaaggtactttagttactgtttcttct

SEQ ID NO: 1046 - protein, 9 aa, synthetic construct
  REGION 1..9: note = Synthetic
TGAVTTSNY

SEQ ID NO: 1047 - skipped

SEQ ID NO: 1048 - protein, 9 aa, synthetic construct
  REGION 1..9: note = Synthetic
ALWYSNLWV

SEQ ID NO: 1049 - protein, 110 aa, synthetic construct; identical to SEQ ID NO: 669
  REGION 1..110: note = Synthetic

SEQ ID NO: 1050 - DNA, 330 bp, synthetic construct; identical to SEQ ID NO: 670
  misc_feature 1..330: note = Synthetic
  source 1..330: mol_type = other DNA

SEQ ID NO: 1051 - protein, 8 aa, synthetic construct
  REGION 1..8: note = Synthetic
GFTFNTYA

SEQ ID NO: 1052 - protein, 10 aa, synthetic construct
  REGION 1..10: note = Synthetic
IRSKYNNYAT

SEQ ID NO: 1053 - protein, 16 aa, synthetic construct
  REGION 1..16: note = Synthetic
ARHGEYSSGWPYYFAY

SEQ ID NO: 1054 - protein, 125 aa, synthetic construct
  REGION 1..125: note = Synthetic
EVQLVESGGGLVQPGGSLRLSCAASGFTFNTYAMNWVRQAPGKGLEWVGRIRSKYNNYATYYADSVKGRFTISRDDSKNTLYLQMNSLRAEDTAVYYCARHGEYSSGWPYYFAYWGQGTLVTVSS

SEQ ID NO: 1055 - DNA, 375 bp, synthetic construct
  misc_feature 1..375: note = Synthetic
  source 1..375: mol_type = other DNA
gaagttcaattagttgaatctggtggtggtttagttcaacctggtggttctttacgtttatcttgtgctgcttctggttttacttttaatacttatgctatgaattgggttcgtcaagctcctggtaaaggtttagaatgggttggtcgtattcgttctaaatataataattatgctacttattatgctgattctgttaaaggtcgttttactatttctcgtgatgattctaaaaatactttatatttacaaatgaattctttacgtgctgaagatactgctgtttattattgtgctcgtcatggtgaatattcttctggttggccttattattttgcttattggggtcaaggtactttagttactgtttcttct

SEQ ID NO: 1056 - protein, 9 aa, synthetic construct
  REGION 1..9: note = Synthetic
TGAVTTSNY

SEQ ID NO: 1057 - skipped

SEQ ID NO: 1058 - protein, 9 aa, synthetic construct
  REGION 1..9: note = Synthetic
ALWYSNLWV

SEQ ID NO: 1059 - protein, 110 aa, synthetic construct; identical to SEQ ID NO: 669
  REGION 1..110: note = Synthetic

SEQ ID NO: 1060 - DNA, 330 bp, synthetic construct; identical to SEQ ID NO: 670
  misc_feature 1..330: note = Synthetic
  source 1..330: mol_type = other DNA

SEQ ID NO: 1061 - protein, 8 aa, synthetic construct
  REGION 1..8: note = Synthetic
GFTFNTYA

SEQ ID NO: 1062 - protein, 10 aa, synthetic construct
  REGION 1..10: note = Synthetic
IRSKYNNYAT

SEQ ID NO: 1063 - protein, 16 aa, synthetic construct
  REGION 1..16: note = Synthetic
VRHGNFGNVGTSYFAY

SEQ ID NO: 1064 - protein, 125 aa, synthetic construct
  REGION 1..125: note = Synthetic
EVQLVESGGGLVQPGGSLRLSCAASGFTFNTYAMNWVRQAPGKGLEWVGRIRSKYNNYATYYADSVKGRFTISRDDSKNTLYLQMNSLRAEDTAVYYCVRHGNFGNVGTSYFAYWGQGTLVTVSS

SEQ ID NO: 1065 - DNA, 375 bp, synthetic construct
  misc_feature 1..375: note = Synthetic
  source 1..375: mol_type = other DNA
gaagttcaattagttgaatctggtggtggtttagttcaacctggtggttctttacgtttatcttgtgctgcttctggttttacttttaatacttatgctatgaattgggttcgtcaagctcctggtaaaggtttagaatgggttggtcgtattcgttctaaatataataattatgctacttattatgctgattctgttaaaggtcgttttactatttctcgtgatgattctaaaaatactttatatttacaaatgaattctttacgtgctgaagatactgctgtttattattgtgttcgtcatggtaattttggtaatgttggtacttcttattttgcttattggggtcaaggtactttagttactgtttcttct

SEQ ID NO: 1066 - protein, 9 aa, synthetic construct
  REGION 1..9: note = Synthetic
TGAVTTSNY

SEQ ID NO: 1067 - skipped

SEQ ID NO: 1068 - protein, 9 aa, synthetic construct
  REGION 1..9: note = Synthetic
ALWYSNLWV

SEQ ID NO: 1069 - protein, 110 aa, synthetic construct; identical to SEQ ID NO: 669
  REGION 1..110: note = Synthetic

SEQ ID NO: 1070 - DNA, 330 bp, synthetic construct; identical to SEQ ID NO: 670
  misc_feature 1..330: note = Synthetic
  source 1..330: mol_type = other DNA

SEQ ID NO: 1071 - protein, 8 aa, synthetic construct
  REGION 1..8: note = Synthetic
GFTFNTYA

SEQ ID NO: 1072 - protein, 10 aa, synthetic construct
  REGION 1..10: note = Synthetic
IRSKYNNYAT

SEQ ID NO: 1073 - protein, 16 aa, synthetic construct
  REGION 1..16: note = Synthetic
VREGIGGTSYRGNFAY

SEQ ID NO: 1074 - protein, 125 aa, synthetic construct
  REGION 1..125: note = Synthetic
EVQLVESGGGLVQPGGSLRLSCAASGFTFNTYAMNWVRQAPGKGLEWVGRIRSKYNNYATYYADSVKGRFTISRDDSKNTLYLQMNSLRAEDTAVYYCVREGIGGTSYRGNFAYWGQGTLVTVSS

SEQ ID NO: 1075 - DNA, 375 bp, synthetic construct
  misc_feature 1..375: note = Synthetic
  source 1..375: mol_type = other DNA
gaagttcaattagttgaatctggtggtggtttagttcaacctggtggttctttacgtttatcttgtgctgcttctggttttacttttaatacttatgctatgaattgggttcgtcaagctcctggtaaaggtttagaatgggttggtcgtattcgttctaaatataataattatgctacttattatgctgattctgttaaaggtcgttttactatttctcgtgatgattctaaaaatactttatatttacaaatgaattctttacgtgctgaagatactgctgtttattattgtgttcgtgaaggtattggtggtacttcttatcgtggtaattttgcttattggggtcaaggtactttagttactgtttcttct

SEQ ID NO: 1076 - protein, 9 aa, synthetic construct
  REGION 1..9: note = Synthetic
TGAVTTSNY

SEQ ID NO: 1077 - skipped

SEQ ID NO: 1078 - protein, 9 aa, synthetic construct
  REGION 1..9: note = Synthetic
ALWYSNLWV

SEQ ID NO: 1079 - protein, 110 aa, synthetic construct; identical to SEQ ID NO: 669
  REGION 1..110: note = Synthetic

SEQ ID NO: 1080 - DNA, 330 bp, synthetic construct; identical to SEQ ID NO: 670
  misc_feature 1..330: note = Synthetic
  source 1..330: mol_type = other DNA

SEQ ID NO: 1081 - protein, 8 aa, synthetic construct
  REGION 1..8: note = Synthetic
GFTFNTYA

SEQ ID NO: 1082 - protein, 10 aa, synthetic construct
  REGION 1..10: note = Synthetic
IRSKYNNYAT

SEQ ID NO: 1083 - protein, 16 aa, synthetic construct
  REGION 1..16: note = Synthetic
VRHGNFGNSYVSWFAY

SEQ ID NO: 1084 - protein, 125 aa, synthetic construct
  REGION 1..125: note = Synthetic
EVQLVESGGGLVQPGGSLRLSCAASGFTFNTYAMNWVRQAPGKGLEWVGRIRSKYNNYATYYADSVKGRFTISRDDSKNTLYLQMNSLRAEDTAVYYCVRHGNFGNSYVSWFAYWGQGTLVTVSS

SEQ ID NO: 1085 - DNA, 375 bp, synthetic construct
  misc_feature 1..375: note = Synthetic
  source 1..375: mol_type = other DNA
gaagttcaattagttgaatctggtggtggtttagttcaacctggtggttctttacgtttatcttgtgctgcttctggttttacttttaatacttatgctatgaattgggttcgtcaagctcctggtaaaggtttagaatgggttggtcgtattcgttctaaatataataattatgctacttattatgctgattctgttaaaggtcgttttactatttctcgtgatgattctaaaaatactttatatttacaaatgaattctttacgtgctgaagatactgctgtttattattgtgttcgtcatggtaattttggtaattcttatgtttcttggtttgcttattggggtcaaggtactttagttactgtttcttct

SEQ ID NO: 1086 - protein, 9 aa, synthetic construct
  REGION 1..9: note = Synthetic
TGAVTTRNY

SEQ ID NO: 1087 - skipped

SEQ ID NO: 1088 - protein, 9 aa, synthetic construct
  REGION 1..9: note = Synthetic
ALWYSNLWV

SEQ ID NO: 1089 - protein, 110 aa, synthetic construct
  REGION 1..110: note = Synthetic
DIQMTQSPSSLSASVGDRVTITCRSSTGAVTTRNYANWVQQKPGKAPKGLIGGTNKRAPGVPARFSGSGSGTDFTLTISSLQPEDFATYYCALWYSNLWVFGQGTKVEIK

SEQ ID NO: 1090 - DNA, 330 bp, synthetic construct
  misc_feature 1..330: note = Synthetic
  source 1..330: mol_type = other DNA
gatattcaaatgactcaatctccttcttctttatctgcttctgttggtgatcgtgttactattacttgtcgttcttctactggtgctgttactactcgtaattatgctaattgggttcaacaaaaacctggtaaagctcctaaaggtttaattggtggtactaataaacgtgctcctggtgttcctgctcgtttttctggttctggttctggtactgattttactttaactatttcttctttacaacctgaagattttgctacttattattgtgctttatggtattctaatttatgggtttttggtcaaggtactaaagttgaaattaaa

SEQ ID NO: 1091 - protein, 8 aa, synthetic construct
  REGION 1..8: note = Synthetic
GFTFNTYA

SEQ ID NO: 1092 - protein, 10 aa, synthetic construct
  REGION 1..10: note = Synthetic
IRSKYNNYAT

SEQ ID NO: 1093 - protein, 16 aa, synthetic construct
  REGION 1..16: note = Synthetic
VRHGNFGNSYVSWFAY

SEQ ID NO: 1094 - protein, 125 aa, synthetic construct; identical to SEQ ID NO: 1084
  REGION 1..125: note = Synthetic

SEQ ID NO: 1095 - DNA, 375 bp, synthetic construct; identical to SEQ ID NO: 1085
  misc_feature 1..375: note = Synthetic
  source 1..375: mol_type = other DNA

SEQ ID NO: 1096 - protein, 9 aa, synthetic construct
  REGION 1..9: note = Synthetic
TGAVTTSTY

SEQ ID NO: 1097 - skipped

SEQ ID NO: 1098 - protein, 9 aa, synthetic construct
  REGION 1..9: note = Synthetic
ALWYSNLWV

SEQ ID NO: 1099 - protein, 110 aa, synthetic construct
  REGION 1..110: note = Synthetic
DIQMTQSPSSLSASVGDRVTITCRSSTGAVTTSTYANWVQQKPGKAPKGLIGGTNKRAPGVPARFSGSGSGTDFTLTISSLQPEDFATYYCALWYSNLWVFGQGTKVEIK

SEQ ID NO: 1100 - DNA, 330 bp, synthetic construct
  misc_feature 1..330: note = Synthetic
  source 1..330: mol_type = other DNA
gatattcaaatgactcaatctccttcttctttatctgcttctgttggtgatcgtgttactattacttgtcgttcttctactggtgctgttactacttctacttatgctaattgggttcaacaaaaacctggtaaagctcctaaaggtttaattggtggtactaataaacgtgctcctggtgttcctgctcgtttttctggttctggttctggtactgattttactttaactatttcttctttacaacctgaagattttgctacttattattgtgctttatggtattctaatttatgggtttttggtcaaggtactaaagttgaaattaaa

SEQ ID NO: 1101 - protein, 8 aa, synthetic construct
  REGION 1..8: note = Synthetic
GFTFNTYA

SEQ ID NO: 1102 - protein, 10 aa, synthetic construct
  REGION 1..10: note = Synthetic
IRSKYNNYAT

SEQ ID NO: 1103 - protein, 16 aa, synthetic construct
  REGION 1..16: note = Synthetic
VRHGNFGNSYVSWFAY

SEQ ID NO: 1104 - protein, 125 aa, synthetic construct; identical to SEQ ID NO: 1084
  REGION 1..125: note = Synthetic

SEQ ID NO: 1105 - DNA, 375 bp, synthetic construct; identical to SEQ ID NO: 1085
  misc_feature 1..375: note = Synthetic
  source 1..375: mol_type = other DNA

SEQ ID NO: 1106 - protein, 9 aa, synthetic construct
  REGION 1..9: note = Synthetic
TGAVSTNYY

SEQ ID NO: 1107 - skipped

SEQ ID NO: 1108 - protein, 9 aa, synthetic construct
  REGION 1..9: note = Synthetic
ALWYSNLWV

SEQ ID NO: 1109 - protein, 110 aa, synthetic construct
  REGION 1..110: note = Synthetic
DIQMTQSPSSLSASVGDRVTITCRSSTGAVSTNYYANWVQQKPGKAPKGLIGGTNKRAPGVPARFSGSGSGTDFTLTISSLQPEDFATYYCALWYSNLWVFGQGTKVEIK

SEQ ID NO: 1110 - DNA, 330 bp, synthetic construct
  misc_feature 1..330: note = Synthetic
  source 1..330: mol_type = other DNA
gatattcaaatgactcaatctccttcttctttatctgcttctgttggtgatcgtgttactattacttgtcgttcttctactggtgctgtttctactaattattatgctaattgggttcaacaaaaacctggtaaagctcctaaaggtttaattggtggtactaataaacgtgctcctggtgttcctgctcgtttttctggttctggttctggtactgattttactttaactatttcttctttacaacctgaagattttgctacttattattgtgctttatggtattctaatttatgggtttttggtcaaggtactaaagttgaaattaaa

SEQ ID NO: 1111 - protein, 8 aa, synthetic construct
  REGION 1..8: note = Synthetic
GFTFNTYA

SEQ ID NO: 1112 - protein, 10 aa, synthetic construct
  REGION 1..10: note = Synthetic
IRSKYNNYAT

SEQ ID NO: 1113 - protein, 16 aa, synthetic construct
  REGION 1..16: note = Synthetic
VRHGNFGNSYVSWFAY

SEQ ID NO: 1114 - protein, 125 aa, synthetic construct; identical to SEQ ID NO: 1084
  REGION 1..125: note = Synthetic

SEQ ID NO: 1115 - DNA, 375 bp, synthetic construct; identical to SEQ ID NO: 1085
  misc_feature 1..375: note = Synthetic
  source 1..375: mol_type = other DNA

SEQ ID NO: 1116 - protein, 9 aa, synthetic construct
  REGION 1..9: note = Synthetic
TGAVPTSNY

SEQ ID NO: 1117 - skipped

SEQ ID NO: 1118 - protein, 9 aa, synthetic construct
  REGION 1..9: note = Synthetic
ALWYSNLWV

SEQ ID NO: 1119 - protein, 110 aa, synthetic construct
  REGION 1..110: note = Synthetic
DIQMTQSPSSLSASVGDRVTITCRSSTGAVPTSNYANWVQQKPGKAPKGLIGGTNKRAPGVPARFSGSGSGTDFTLTISSLQPEDFATYYCALWYSNLWVFGQGTKVEIK

SEQ ID NO: 1120 - DNA, 330 bp, synthetic construct
  misc_feature 1..330: note = Synthetic
  source 1..330: mol_type = other DNA
gatattcaaatgactcaatctccttcttctttatctgcttctgttggtgatcgtgttactattacttgtcgttcttctactggtgctgttcctacttctaattatgctaattgggttcaacaaaaacctggtaaagctcctaaaggtttaattggtggtactaataaacgtgctcctggtgttcctgctcgtttttctggttctggttctggtactgattttactttaactatttcttctttacaacctgaagattttgctacttattattgtgctttatggtattctaatttatgggtttttggtcaaggtactaaagttgaaattaaa

SEQ ID NO: 1121 - protein, 8 aa, synthetic construct
  REGION 1..8: note = Synthetic
GFTFNTYA

SEQ ID NO: 1122 - protein, 10 aa, synthetic construct
  REGION 1..10: note = Synthetic
IRSKYNNYAT

SEQ ID NO: 1123 - protein, 16 aa, synthetic construct
  REGION 1..16: note = Synthetic
VRHGNFGNSYVSWFAY

SEQ ID NO: 1124 - protein, 125 aa, synthetic construct; identical to SEQ ID NO: 1084
  REGION 1..125: note = Synthetic

SEQ ID NO: 1125 - DNA, 375 bp, synthetic construct; identical to SEQ ID NO: 1085
  misc_feature 1..375: note = Synthetic
  source 1..375: mol_type = other DNA

SEQ ID NO: 1126 - protein, 9 aa, synthetic construct
  REGION 1..9: note = Synthetic
TGAVPTSLY

SEQ ID NO: 1127 - skipped

SEQ ID NO: 1128 - protein, 9 aa, synthetic construct
  REGION 1..9: note = Synthetic
ALWYSNLWV

SEQ ID NO: 1129 - protein, 110 aa, synthetic construct
  REGION 1..110: note = Synthetic
DIQMTQSPSSLSASVGDRVTITCRSSTGAVPTSLYANWVQQKPGKAPKGLIGGTNKRAPGVPARFSGSGSGTDFTLTISSLQPEDFATYYCALWYSNLWVFGQGTKVEIK

SEQ ID NO: 1130 - DNA, 330 bp, synthetic construct
  misc_feature 1..330: note = Synthetic
  source 1..330: mol_type = other DNA
gatattcaaatgactcaatctccttcttctttatctgcttctgttggtgatcgtgttactattacttgtcgttcttctactggtgctgttcctacttctttatatgctaattgggttcaacaaaaacctggtaaagctcctaaaggtttaattggtggtactaataaacgtgctcctggtgttcctgctcgtttttctggttctggttctggtactgattttactttaactatttcttctttacaacctgaagattttgctacttattattgtgctttatggtattctaatttatgggtttttggtcaaggtactaaagttgaaattaaa

SEQ ID NO: 1131 - protein, 8 aa, synthetic construct
  REGION 1..8: note = Synthetic
GFTFNTYA

SEQ ID NO: 1132 - protein, 10 aa, synthetic construct
  REGION 1..10: note = Synthetic
IRSKYNNYAT

SEQ ID NO: 1133 - protein, 16 aa, synthetic construct
  REGION 1..16: note = Synthetic
VRHGNFGNSYVSWFAY

SEQ ID NO: 1134 - protein, 125 aa, synthetic construct; identical to SEQ ID NO: 1084
  REGION 1..125: note = Synthetic

SEQ ID NO: 1135 - DNA, 375 bp, synthetic construct; identical to SEQ ID NO: 1085
  misc_feature 1..375: note = Synthetic
  source 1..375: mol_type = other DNA

SEQ ID NO: 1136 - protein, 9 aa, synthetic construct
  REGION 1..9: note = Synthetic
TGAVTPSNY

SEQ ID NO: 1137 - skipped

SEQ ID NO: 1138 - protein, 9 aa, synthetic construct
  REGION 1..9: note = Synthetic
ALWYSNLWV

SEQ ID NO: 1139 - protein, 110 aa, synthetic construct
  REGION 1..110: note = Synthetic
DIQMTQSPSSLSASVGDRVTITCRSSTGAVTPSNYANWVQQKPGKAPKGLIGGTNKRAPGVPARFSGSGSGTDFTLTISSLQPEDFATYYCALWYSNLWVFGQGTKVEIK

SEQ ID NO: 1140 - DNA, 330 bp, synthetic construct
  misc_feature 1..330: note = Synthetic
  source 1..330: mol_type = other DNA
gatattcaaatgactcaatctccttcttctttatctgcttctgttggtgatcgtgttactattacttgtcgttcttctactggtgctgttactccttctaattatgctaattgggttcaacaaaaacctggtaaagctcctaaaggtttaattggtggtactaataaacgtgctcctggtgttcctgctcgtttttctggttctggttctggtactgattttactttaactatttcttctttacaacctgaagattttgctacttattattgtgctttatggtattctaatttatgggtttttggtcaaggtactaaagttgaaattaaa

SEQ ID NO: 1141 - protein, 8 aa, synthetic construct
  REGION 1..8: note = Synthetic
GFTFNTYA

SEQ ID NO: 1142 - protein, 10 aa, synthetic construct
  REGION 1..10: note = Synthetic
IRSKYNNYAT

SEQ ID NO: 1143 - protein, 16 aa, synthetic construct
  REGION 1..16: note = Synthetic
VRHGNFGNSYVSWFAY

SEQ ID NO: 1144 - protein, 125 aa, synthetic construct; identical to SEQ ID NO: 1084
  REGION 1..125: note = Synthetic

SEQ ID NO: 1145 - DNA, 375 bp, synthetic construct; identical to SEQ ID NO: 1085
  misc_feature 1..375: note = Synthetic
  source 1..375: mol_type = other DNA

SEQ ID NO: 1146 - protein, 9 aa, synthetic construct
  REGION 1..9: note = Synthetic
GGSVTTHNY

SEQ ID NO: 1147 - skipped

SEQ ID NO: 1148 - protein, 9 aa, synthetic construct
  REGION 1..9: note = Synthetic
ALWYSNLWV

SEQ ID NO: 1149 - protein, 110 aa, synthetic construct
  REGION 1..110: note = Synthetic
DIQMTQSPSSLSASVGDRVTITCRSSGGSVTTHNYANWVQQKPGKAPKGLIGGTNKRAPGVPARFSGSGSGTDFTLTISSLQPEDFATYYCALWYSNLWVFGQGTKVEIK

SEQ ID NO: 1150 - DNA, 330 bp, synthetic construct
  misc_feature 1..330: note = Synthetic
  source 1..330: mol_type = other DNA
gatattcaaatgactcaatctccttcttctttatctgcttctgttggtgatcgtgttactattacttgtcgttcttctggtggttctgttactactcataattatgctaattgggttcaacaaaaacctggtaaagctcctaaaggtttaattggtggtactaataaacgtgctcctggtgttcctgctcgtttttctggttctggttctggtactgattttactttaactatttcttctttacaacctgaagattttgctacttattattgtgctttatggtattctaatttatgggtttttggtcaaggtactaaagttgaaattaaa

SEQ ID NO: 1151 - protein, 8 aa, synthetic construct
  REGION 1..8: note = Synthetic
GFTFNTYA

SEQ ID NO: 1152 - protein, 10 aa, synthetic construct
  REGION 1..10: note = Synthetic
IRSKYNNYAT

SEQ ID NO: 1153 - protein, 16 aa, synthetic construct
  REGION 1..16: note = Synthetic
VRHGNFGNSYVSWFAY

SEQ ID NO: 1154 - protein, 125 aa, synthetic construct; identical to SEQ ID NO: 1084
  REGION 1..125: note = Synthetic

SEQ ID NO: 1155 - DNA, 375 bp, synthetic construct; identical to SEQ ID NO: 1085
  misc_feature 1..375: note = Synthetic
  source 1..375: mol_type = other DNA

SEQ ID NO: 1156 - protein, 9 aa, synthetic construct
  REGION 1..9: note = Synthetic
TGAVTSPSY

SEQ ID NO: 1157 - skipped

SEQ ID NO: 1158 - protein, 9 aa, synthetic construct
  REGION 1..9: note = Synthetic
ALWYSNLWV

SEQ ID NO: 1159 - protein, 110 aa, synthetic construct
  REGION 1..110: note = Synthetic
DIQMTQSPSSLSASVGDRVTITCRSSTGAVTSPSYANWVQQKPGKAPKGLIGGTNKRAPGVPARFSGSGSGTDFTLTISSLQPEDFATYYCALWYSNLWVFGQGTKVEIK

SEQ ID NO: 1160 - DNA, 330 bp, synthetic construct
  misc_feature 1..330: note = Synthetic
  source 1..330: mol_type = other DNA
gatattcaaatgactcaatctccttcttctttatctgcttctgttggtgatcgtgttactattacttgtcgttcttctactggtgctgttacttctccttcttatgctaattgggttcaacaaaaacctggtaaagctcctaaaggtttaattggtggtactaataaacgtgctcctggtgttcctgctcgtttttctggttctggttctggtactgattttactttaactatttcttctttacaacctgaagattttgctacttattattgtgctttatggtattctaatttatgggtttttggtcaaggtactaaagttgaaattaaa

SEQ ID NO: 1161 - protein, 8 aa, synthetic construct
  REGION 1..8: note = Synthetic
GFTFNTYA

SEQ ID NO: 1162 - protein, 10 aa, synthetic construct
  REGION 1..10: note = Synthetic
IRSKYNNYAT

SEQ ID NO: 1163 - protein, 16 aa, synthetic construct
  REGION 1..16: note = Synthetic
VRHGNFGNSYVSWFAY

SEQ ID NO: 1164 - protein, 125 aa, synthetic construct; identical to SEQ ID NO: 1084
  REGION 1..125: note = Synthetic

SEQ ID NO: 1165 - DNA, 375 bp, synthetic construct; identical to SEQ ID NO: 1085
  misc_feature 1..375: note = Synthetic
  source 1..375: mol_type = other DNA

SEQ ID NO: 1166 - protein, 9 aa, synthetic construct
  REGION 1..9: note = Synthetic
LGSVTTFNY

SEQ ID NO: 1167 - skipped

SEQ ID NO: 1168 - protein, 9 aa, synthetic construct
  REGION 1..9: note = Synthetic
ALWYSNLWV

SEQ ID NO: 1169 - protein, 110 aa, synthetic construct
  REGION 1..110: note = Synthetic
DIQMTQSPSSLSASVGDRVTITCRSSLGSVTTFNYANWVQQKPGKAPKGLIGGTNKRAPGVPARFSGSGSGTDFTLTISSLQPEDFATYYCALWYSNLWVFGQGTKVEIK

SEQ ID NO: 1170 - DNA, 330 bp, synthetic construct
  misc_feature 1..330: note = Synthetic
  source 1..330: mol_type = other DNA
gatattcaaatgactcaatctccttcttctttatctgcttctgttggtgatcgtgttactattacttgtcgttcttctttaggttctgttactacttttaattatgctaattgggttcaacaaaaacctggtaaagctcctaaaggtttaattggtggtactaataaacgtgctcctggtgttcctgctcgtttttctggttctggttctggtactgattttactttaactatttcttctttacaacctgaagattttgctacttattattgtgctttatggtattctaatttatgggtttttggtcaaggtactaaagttgaaattaaa

SEQ ID NO: 1171 - protein, 8 aa, synthetic construct
  REGION 1..8: note = Synthetic
GFTFNTYA

SEQ ID NO: 1172 - protein, 10 aa, synthetic construct
  REGION 1..10: note = Synthetic
IRSKYNNYAT

SEQ ID NO: 1173 - protein, 16 aa, synthetic construct
  REGION 1..16: note = Synthetic
VRHGNFGNSYVSWFAY

SEQ ID NO: 1174 - protein, 125 aa, synthetic construct; identical to SEQ ID NO: 1084
  REGION 1..125: note = Synthetic

SEQ ID NO: 1175 - DNA, 375 bp, synthetic construct; identical to SEQ ID NO: 1085
  misc_feature 1..375: note = Synthetic
  source 1..375: mol_type = other DNA

SEQ ID NO: 1176 - protein, 9 aa, synthetic construct
  REGION 1..9: note = Synthetic
TGAVTTSNY

SEQ ID NO: 1177 - skipped

SEQ ID NO: 1178 - protein, 9 aa, synthetic construct
  REGION 1..9: note = Synthetic
ALWYSNLWV

SEQ ID NO: 1179 - protein, 110 aa, synthetic construct
  REGION 1..110: note = Synthetic
DIQMTQSPSSLSASVGDRVTITCRSSTGAVTTSNYANWVQQKPGKAPKGLIGGTLKRAPGVPARFSGSGSGTDFTLTISSLQPEDFATYYCALWYSNLWVFGQGTKVEIK

SEQ ID NO: 1180 - DNA, 330 bp, synthetic construct
  misc_feature 1..330: note = Synthetic
  source 1..330: mol_type = other DNA
gatattcaaatgactcaatctccttcttctttatctgcttctgttggtgatcgtgttactattacttgtcgttcttctactggtgctgttactacttctaattatgctaattgggttcaacaaaaacctggtaaagctcctaaaggtttaattggtggtactttaaaacgtgctcctggtgttcctgctcgtttttctggttctggttctggtactgattttactttaactatttcttctttacaacctgaagattttgctacttattattgtgctttatggtattctaatttatgggtttttggtcaaggtactaaagttgaaattaaa

SEQ ID NO: 1181 - protein, 8 aa, synthetic construct
  REGION 1..8: note = Synthetic
GFTFNTYA

SEQ ID NO: 1182 - protein, 10 aa, synthetic construct
  REGION 1..10: note = Synthetic
IRSKYNNYAT

SEQ ID NO: 1183 - protein, 16 aa, synthetic construct
  REGION 1..16: note = Synthetic
VRHGNFGNSYVSWFAY

SEQ ID NO: 1184 - protein, 125 aa, synthetic construct; identical to SEQ ID NO: 1084
  REGION 1..125: note = Synthetic

SEQ ID NO: 1185 - DNA, 375 bp, synthetic construct; identical to SEQ ID NO: 1085
  misc_feature 1..375: note = Synthetic
  source 1..375: mol_type = other DNA

SEQ ID NO: 1186 - protein, 9 aa, synthetic construct
  REGION 1..9: note = Synthetic
TGAVTTSNY

SEQ ID NO: 1187 - skipped

SEQ ID NO: 1188 - protein, 9 aa, synthetic construct
  REGION 1..9: note = Synthetic
ALWYSNLWV

SEQ ID NO: 1189 - protein, 110 aa, synthetic construct
  REGION 1..110: note = Synthetic
DIQMTQSPSSLSASVGDRVTITCRSSTGAVTTSNYANWVQQKPGKAPKGLIGAYNKRAPGVPARFSGSGSGTDFTLTISSLQPEDFATYYCALWYSNLWVFGQGTKVEIK

SEQ ID NO: 1190 - DNA, 330 bp, synthetic construct
  misc_feature 1..330: note = Synthetic
  source 1..330: mol_type = other DNA
gatattcaaatgactcaatctccttcttctttatctgcttctgttggtgatcgtgttactattacttgtcgttcttctactggtgctgttactacttctaattatgctaattgggttcaacaaaaacctggtaaagctcctaaaggtttaattggtgcttataataaacgtgctcctggtgttcctgctcgtttttctggttctggttctggtactgattttactttaactatttcttctttacaacctgaagattttgctacttattattgtgctttatggtattctaatttatgggtttttggtcaaggtactaaagttgaaattaaa

SEQ ID NO: 1191 - protein, 8 aa, synthetic construct
  REGION 1..8: note = Synthetic
GFTFNTYA

SEQ ID NO: 1192 - protein, 10 aa, synthetic construct
  REGION 1..10: note = Synthetic
IRSKYNNYAT

SEQ ID NO: 1193 - protein, 16 aa, synthetic construct
  REGION 1..16: note = Synthetic
VRHGNFGNSYVSWFAY

SEQ ID NO: 1194 - protein, 125 aa, synthetic construct; identical to SEQ ID NO: 1084
  REGION 1..125: note = Synthetic

SEQ ID NO: 1195 - DNA, 375 bp, synthetic construct; identical to SEQ ID NO: 1085
  misc_feature 1..375: note = Synthetic
  source 1..375: mol_type = other DNA

SEQ ID NO: 1196 - protein, 9 aa, synthetic construct
  REGION 1..9: note = Synthetic
TGAVTTSNY

SEQ ID NO: 1197 - skipped

SEQ ID NO: 1198 - protein, 9 aa, synthetic construct
  REGION 1..9: note = Synthetic
ALWYSNLWV

SEQ ID NO: 1199 - protein, 110 aa, synthetic construct
  REGION 1..110: note = Synthetic
DIQMTQSPSSLSASVGDRVTITCRSSTGAVTTSNYANWVQQKPGKAPKGLIGGQNKRAPGVPARFSGSGSGTDFTLTISSLQPEDFATYYCALWYSNLWVFGQGTKVEIK

SEQ ID NO: 1200 - DNA, 330 bp, synthetic construct
  misc_feature 1..330: note = Synthetic
  source 1..330: mol_type = other DNA
gatattcaaatgactcaatctccttcttctttatctgcttctgttggtgatcgtgttactattacttgtcgttcttctactggtgctgttactacttctaattatgctaattgggttcaacaaaaacctggtaaagctcctaaaggtttaattggtggtcaaaataaacgtgctcctggtgttcctgctcgtttttctggttctggttctggtactgattttactttaactatttcttctttacaacctgaagattttgctacttattattgtgctttatggtattctaatttatgggtttttggtcaaggtactaaagttgaaattaaa

SEQ ID NO: 1201 - protein, 8 aa, synthetic construct
  REGION 1..8: note = Synthetic
GFTFNTYA

SEQ ID NO: 1202 - protein, 10 aa, synthetic construct
  REGION 1..10: note = Synthetic
IRSKYNNYAT

SEQ ID NO: 1203 - protein, 16 aa, synthetic construct
  REGION 1..16: note = Synthetic
VRHGNFGNSYVSWFAY

SEQ ID NO: 1204 - protein, 125 aa, synthetic construct; identical to SEQ ID NO: 1084
  REGION 1..125: note = Synthetic

SEQ ID NO: 1205 - DNA, 375 bp, synthetic construct; identical to SEQ ID NO: 1085
  misc_feature 1..375: note = Synthetic
  source 1..375: mol_type = other DNA

SEQ ID NO: 1206 - protein, 9 aa, synthetic construct
  REGION 1..9: note = Synthetic
TGAVTTSNY

SEQ ID NO: 1207 - skipped

SEQ ID NO: 1208 - protein, 9 aa, synthetic construct
  REGION 1..9: note = Synthetic
ALWYSNLWV

SEQ ID NO: 1209 - protein, 110 aa, synthetic construct
  REGION 1..110: note = Synthetic
DIQMTQSPSSLSASVGDRVTITCRSSTGAVTTSNYANWVQQKPGKAPKGLIGSTDKRAPGVPARFSGSGSGTDFTLTISSLQPEDFATYYCALWYSNLWVFGQGTKVEIK

SEQ ID NO: 1210 - DNA, 330 bp, synthetic construct
  misc_feature 1..330: note = Synthetic
  source 1..330: mol_type = other DNA
gatattcaaatgactcaatctccttcttctttatctgcttctgttggtgatcgtgttactattacttgtcgttcttctactggtgctgttactacttctaattatgctaattgggttcaacaaaaacctggtaaagctcctaaaggtttaattggttctactgataaacgtgctcctggtgttcctgctcgtttttctggttctggttctggtactgattttactttaactatttcttctttacaacctgaagattttgctacttattattgtgctttatggtattctaatttatgggtttttggtcaaggtactaaagttgaaattaaa

SEQ ID NO: 1211 - protein, 8 aa, synthetic construct
  REGION 1..8: note = Synthetic
GFTFNTYA

SEQ ID NO: 1212 - protein, 10 aa, synthetic construct
  REGION 1..10: note = Synthetic
IRSKYNNYAT

SEQ ID NO: 1213 - protein, 16 aa, synthetic construct
  REGION 1..16: note = Synthetic
VRHGNFGNSYVSWFAY

SEQ ID NO: 1214 - protein, 125 aa, synthetic construct; identical to SEQ ID NO: 1084
  REGION 1..125: note = Synthetic

SEQ ID NO: 1215 - DNA, 375 bp, synthetic construct; identical to SEQ ID NO: 1085
  misc_feature 1..375: note = Synthetic
  source 1..375: mol_type = other DNA

SEQ ID NO: 1216 - protein, 9 aa, synthetic construct
  REGION 1..9: note = Synthetic
TGAVTTSNY

SEQ ID NO: 1217 - skipped

SEQ ID NO: 1218 - protein, 9 aa, synthetic construct
  REGION 1..9: note = Synthetic
ALYYSFSWV

SEQ ID NO: 1219 - protein, 110 aa, synthetic construct
  REGION 1..110: note = Synthetic
DIQMTQSPSSLSASVGDRVTITCRSSTGAVTTSNYANWVQQKPGKAPKGLIGGTNKRAPGVPARFSGSGSGTDFTLTISSLQPEDFATYYCALYYSFSWVFGQGTKVEIK

SEQ ID NO: 1220 - DNA, 330 bp, synthetic construct
  misc_feature 1..330: note = Synthetic
  source 1..330: mol_type = other DNA
gatattcaaatgactcaatctccttcttctttatctgcttctgttggtgatcgtgttactattacttgtcgttcttctactggtgctgttactacttctaattatgctaattgggttcaacaaaaacctggtaaagctcctaaaggtttaattggtggtactaataaacgtgctcctggtgttcctgctcgtttttctggttctggttctggtactgattttactttaactatttcttctttacaacctgaagattttgctacttattattgtgctttatattattctttttcttgggtttttggtcaaggtactaaagttgaaattaaa

SEQ ID NO: 1221 - protein, 8 aa, synthetic construct
  REGION 1..8: note = Synthetic
GFTFNTYA

SEQ ID NO: 1222 - protein, 10 aa, synthetic construct
  REGION 1..10: note = Synthetic
IRSKYNNYAT

SEQ ID NO: 1223 - protein, 16 aa, synthetic construct
  REGION 1..16: note = Synthetic
VRHGNFGNSYVSWFAY

SEQ ID NO: 1224 - protein, 125 aa, synthetic construct; identical to SEQ ID NO: 1084
  REGION 1..125: note = Synthetic

SEQ ID NO: 1225 - DNA, 375 bp, synthetic construct; identical to SEQ ID NO: 1085
  misc_feature 1..375: note = Synthetic
  source 1..375: mol_type = other DNA

SEQ ID NO: 1226 - protein, 9 aa, synthetic construct
  REGION 1..9: note = Synthetic
TGAVTTSNY

SEQ ID NO: 1227 - skipped

SEQ ID NO: 1228 - protein, 9 aa, synthetic construct
  REGION 1..9: note = Synthetic
QTWGNNIWV

SEQ ID NO: 1229 - protein, 110 aa, synthetic construct
  REGION 1..110: note = Synthetic
DIQMTQSPSSLSASVGDRVTITCRSSTGAVTTSNYANWVQQKPGKAPKGLIGGTNKRAPGVPARFSGSGSGTDFTLTISSLQPEDFATYYCQTWGNNIWVFGQGTKVEIK

SEQ ID NO: 1230 - DNA, 330 bp, synthetic construct
  misc_feature 1..330: note = Synthetic
  source 1..330: mol_type = other DNA
gatattcaaatgactcaatctccttcttctttatctgcttctgttggtgatcgtgttactattacttgtcgttcttctactggtgctgttactacttctaattatgctaattgggttcaacaaaaacctggtaaagctcctaaaggtttaattggtggtactaataaacgtgctcctggtgttcctgctcgtttttctggttctggttctggtactgattttactttaactatttcttctttacaacctgaagattttgctacttattattgtcaaacttggggtaataatatttgggtttttggtcaaggtactaaagttgaaattaaa

SEQ ID NO: 1231 - protein, 8 aa, synthetic construct
  REGION 1..8: note = Synthetic
GFTFNTYA

SEQ ID NO: 1232 - protein, 10 aa, synthetic construct
  REGION 1..10: note = Synthetic
IRSKYNNYAT

SEQ ID NO: 1233 - protein, 16 aa, synthetic construct
  REGION 1..16: note = Synthetic
VRHGNFGNSYVSWFAY

SEQ ID NO: 1234 - protein, 125 aa, synthetic construct; identical to SEQ ID NO: 1084
  REGION 1..125: note = Synthetic

SEQ ID NO: 1235 - DNA, 375 bp, synthetic construct; identical to SEQ ID NO: 1085
  misc_feature 1..375: note = Synthetic
  source 1..375: mol_type = other DNA

SEQ ID NO: 1236 - protein, 9 aa, synthetic construct
  REGION 1..9: note = Synthetic
TGAVTTSNY

SEQ ID NO: 1237 - skipped

SEQ ID NO: 1238 - protein, 9 aa, synthetic construct
  REGION 1..9: note = Synthetic
AIWYSRVWV

SEQ ID NO: 1239 - protein, 110 aa, synthetic construct
  REGION 1..110: note = Synthetic
DIQMTQSPSSLSASVGDRVTITCRSSTGAVTTSNYANWVQQKPGKAPKGLIGGTNKRAPGVPARFSGSGSGTDFTLTISSLQPEDFATYYCAIWYSRVWVFGQGTKVEIK

SEQ ID NO: 1240 - DNA, 330 bp, synthetic construct
  misc_feature 1..330: note = Synthetic
  source 1..330: mol_type = other DNA
gatattcaaatgactcaatctccttcttctttatctgcttctgttggtgatcgtgttactattacttgtcgttcttctactggtgctgttactacttctaattatgctaattgggttcaacaaaaacctggtaaagctcctaaaggtttaattggtggtactaataaacgtgctcctggtgttcctgctcgtttttctggttctggttctggtactgattttactttaactatttcttctttacaacctgaagattttgctacttattattgtgctatttggtattctcgtgtttgggtttttggtcaaggtactaaagttgaaattaaa

SEQ ID NO: 1241 - protein, 8 aa, synthetic construct
  REGION 1..8: note = Synthetic
GFTFNTYA

SEQ ID NO: 1242 - protein, 10 aa, synthetic construct
  REGION 1..10: note = Synthetic
IRSKYNNYAT

SEQ ID NO: 1243 - protein, 16 aa, synthetic construct
  REGION 1..16: note = Synthetic
VRHGNFGNSYVSWFAY

SEQ ID NO: 1244 - protein, 125 aa, synthetic construct; identical to SEQ ID NO: 1084
  REGION 1..125: note = Synthetic

SEQ ID NO: 1245 - DNA, 375 bp, synthetic construct; identical to SEQ ID NO: 1085
  misc_feature 1..375: note = Synthetic
  source 1..375: mol_type = other DNA

SEQ ID NO: 1246 - protein, 9 aa, synthetic construct
  REGION 1..9: note = Synthetic
TGAVTTSNY

SEQ ID NO: 1247 - skipped

SEQ ID NO: 1248 - protein, 9 aa, synthetic construct
  REGION 1..9: note = Synthetic
AIWYSTSWV

SEQ ID NO: 1249 - protein, 110 aa, synthetic construct
  REGION 1..110: note = Synthetic
DIQMTQSPSSLSASVGDRVTITCRSSTGAVTTSNYANWVQQKPGKAPKGLIGGTNKRAPGVPARFSGSGSGTDFTLTISSLQPEDFATYYCAIWYSTSWVFGQGTKVEIK

SEQ ID NO: 1250 - DNA, 330 bp, synthetic construct
  misc_feature 1..330: note = Synthetic
  source 1..330: mol_type = other DNA
gatattcaaatgactcaatctccttcttctttatctgcttctgttggtgatcgtgttactattacttgtcgttcttctactggtgctgttactacttctaattatgctaattgggttcaacaaaaacctggtaaagctcctaaaggtttaattggtggtactaataaacgtgctcctggtgttcctgctcgtttttctggttctggttctggtactgattttactttaactatttcttctttacaacctgaagattttgctacttattattgtgctatttggtattctacttcttgggtttttggtcaaggtactaaagttgaaattaaa

SEQ ID NO: 1251 - protein, 8 aa, synthetic construct
  REGION 1..8: note = Synthetic
GFTFNTYA

SEQ ID NO: 1252 - protein, 10 aa, synthetic construct
  REGION 1..10: note = Synthetic
IRSKYNNYAT

SEQ ID NO: 1253 - protein, 16 aa, synthetic construct
  REGION 1..16: note = Synthetic
VRHGNFGNSYVSWFAY

SEQ ID NO: 1254 - protein, 125 aa, synthetic construct; identical to SEQ ID NO: 1084
  REGION 1..125: note = Synthetic

SEQ ID NO: 1255 - DNA, 375 bp, synthetic construct; identical to SEQ ID NO: 1085
  misc_feature 1..375: note = Synthetic
  source 1..375: mol_type = other DNA

SEQ ID NO: 1256 - protein, 9 aa, synthetic construct
  REGION 1..9: note = Synthetic
TGAVTTSNY

SEQ ID NO: 1257 - skipped

SEQ ID NO: 1258 - protein, 9 aa, synthetic construct
  REGION 1..9: note = Synthetic
VIWHSGAWV

SEQ ID NO: 1259 - protein, 110 aa, synthetic construct
  REGION 1..110: note = Synthetic
DIQMTQSPSSLSASVGDRVTITCRSSTGAVTTSNYANWVQQKPGKAPKGLIGGTNKRAPGVPARFSGSGSGTDFTLTISSLQPEDFATYYCVIWHSGAWVFGQGTKVEIK

SEQ ID NO: 1260 - DNA, 330 bp, synthetic construct
  misc_feature 1..330: note = Synthetic
  source 1..330: mol_type = other DNA
gatattcaaatgactcaatctccttcttctttatctgcttctgttggtgatcgtgttactattacttgtcgttcttctactggtgctgttactacttctaattatgctaattgggttcaacaaaaacctggtaaagctcctaaaggtttaattggtggtactaataaacgtgctcctggtgttcctgctcgtttttctggttctggttctggtactgattttactttaactatttcttctttacaacctgaagattttgctacttattattgtgttatttggcattctggtgcttgggtttttggtcaaggtactaaagttgaaattaaa

SEQ ID NO: 1261 - protein, 8 aa, synthetic construct
  REGION 1..8: note = Synthetic
GFTFNTYA

SEQ ID NO: 1262 - protein, 10 aa, synthetic construct
  REGION 1..10: note = Synthetic
IRSKYNNYAT

SEQ ID NO: 1263 - protein, 16 aa, synthetic construct
  REGION 1..16: note = Synthetic
VRHGNFGNSYVSWFAY

SEQ ID NO: 1264 - protein, 125 aa, synthetic construct; identical to SEQ ID NO: 1084
  REGION 1..125: note = Synthetic

SEQ ID NO: 1265 - DNA, 375 bp, synthetic construct; identical to SEQ ID NO: 1085
  misc_feature 1..375: note = Synthetic
  source 1..375: mol_type = other DNA

SEQ ID NO: 1266 - protein, 9 aa, synthetic construct
  REGION 1..9: note = Synthetic
TGAVTTSNY

SEQ ID NO: 1267 - skipped

SEQ ID NO: 1268 - protein, 9 aa, synthetic construct
  REGION 1..9: note = Synthetic
VVWHSSLWL

SEQ ID NO: 1269 - protein, 110 aa, synthetic construct
  REGION 1..110: note = Synthetic
DIQMTQSPSSLSASVGDRVTITCRSSTGAVTTSNYANWVQQKPGKAPKGLIGGTNKRAPGVPARFSGSGSGTDFTLTISSLQPEDFATYYCVVWHSSLWLFGQGTKVEIK

SEQ ID NO: 1270 - DNA, 330 bp, synthetic construct
  misc_feature 1..330: note = Synthetic
  source 1..330: mol_type = other DNA
gatattcaaatgactcaatctccttcttctttatctgcttctgttggtgatcgtgttactattacttgtcgttcttctactggtgctgttactacttctaattatgctaattgggttcaacaaaaacctggtaaagctcctaaaggtttaattggtggtactaataaacgtgctcctggtgttcctgctcgtttttctggttctggttctggtactgattttactttaactatttcttctttacaacctgaagattttgctacttattattgtgttgtttggcattcttctttatggttatttggtcaaggtactaaagttgaaattaaa

SEQ ID NO: 1271 - protein, 8 aa, synthetic construct
  REGION 1..8: note = Synthetic
GFTFNTYA

SEQ ID NO: 1272 - protein, 10 aa, synthetic construct
  REGION 1..10: note = Synthetic
IRSKYNNYAT

SEQ ID NO: 1273 - protein, 16 aa, synthetic construct
  REGION 1..16: note = Synthetic
VRHGNFGNSYVSWFAY

SEQ ID NO: 1274 - protein, 125 aa, synthetic construct; identical to SEQ ID NO: 1084
  REGION 1..125: note = Synthetic

SEQ ID NO: 1275 - DNA, 375 bp, synthetic construct; identical to SEQ ID NO: 1085
  misc_feature 1..375: note = Synthetic
  source 1..375: mol_type = other DNA

SEQ ID NO: 1276 - protein, 9 aa, synthetic construct
  REGION 1..9: note = Synthetic
TGAVTTSNY

SEQ ID NO: 1277 - skipped

SEQ ID NO: 1278 - protein, 9 aa, synthetic construct
  REGION 1..9: note = Synthetic
LLSYSRSWV

SEQ ID NO: 1279 - protein, 110 aa, synthetic construct
  REGION 1..110: note = Synthetic
DIQMTQSPSSLSASVGDRVTITCRSSTGAVTTSNYANWVQQKPGKAPKGLIGGTNKRAPGVPARFSGSGSGTDFTLTISSLQPEDFATYYCLLSYSRSWVFGQGTKVEIK

SEQ ID NO: 1280 - DNA, 330 bp, synthetic construct
  misc_feature 1..330: note = Synthetic
  source 1..330: mol_type = other DNA
gatattcaaatgactcaatctccttcttctttatctgcttctgttggtgatcgtgttactattacttgtcgttcttctactggtgctgttactacttctaattatgctaattgggttcaacaaaaacctggtaaagctcctaaaggtttaattggtggtactaataaacgtgctcctggtgttcctgctcgtttttctggttctggttctggtactgattttactttaactatttcttctttacaacctgaagattttgctacttattattgtttattatcttattctcgttcttgggtttttggtcaaggtactaaagttgaaattaaa

SEQ ID NO: 1281 - protein, 8 aa, synthetic construct
  REGION 1..8: note = Synthetic
GFTFNTYA

SEQ ID NO: 1282 - protein, 10 aa, synthetic construct
  REGION 1..10: note = Synthetic
IRSKYNNYAT

SEQ ID NO: 1283 - protein, 16 aa, synthetic construct
  REGION 1..16: note = Synthetic
VRHGNFGNSYVSWFAY

SEQ ID NO: 1284 - protein, 125 aa, synthetic construct; identical to SEQ ID NO: 1084
  REGION 1..125: note = Synthetic

SEQ ID NO: 1285 - DNA, 375 bp, synthetic construct; identical to SEQ ID NO: 1085
  misc_feature 1..375: note = Synthetic
  source 1..375: mol_type = other DNA

SEQ ID NO: 1286 - protein, 9 aa, synthetic construct
  REGION 1..9: note = Synthetic
TGAVTTSNY

SEQ ID NO: 1287 - skipped

SEQ ID NO: 1288 - protein, 9 aa, synthetic construct
  REGION 1..9: note = Synthetic
LLFYNRLWV

SEQ ID NO: 1289 - protein, 110 aa, synthetic construct
  REGION 1..110: note = Synthetic
DIQMTQSPSSLSASVGDRVTITCRSSTGAVTTSNYANWVQQKPGKAPKGLIGGTNKRAPGVPARFSGSGSGTDFTLTISSLQPEDFATYYCLLFYNRLWVFGQGTKVEIK

SEQ ID NO: 1290 - DNA, 330 bp, synthetic construct
  misc_feature 1..330: note = Synthetic
  source 1..330: mol_type = other DNA
gatattcaaatgactcaatctccttcttctttatctgcttctgttggtgatcgtgttactattacttgtcgttcttctactggtgctgttactacttctaattatgctaattgggttcaacaaaaacctggtaaagctcctaaaggtttaattggtggtactaataaacgtgctcctggtgttcctgctcgtttttctggttctggttctggtactgattttactttaactatttcttctttacaacctgaagattttgctacttattattgtttattattttataatcgtttatgggtttttggtcaaggtactaaagttgaaattaaa

SEQ ID NO: 1291 - protein, 8 aa, synthetic construct
  REGION 1..8: note = Synthetic
GFTFNTYA

SEQ ID NO: 1292 - protein, 10 aa, synthetic construct
  REGION 1..10: note = Synthetic
IRSKYNNYAT

SEQ ID NO: 1293 - protein, 16 aa, synthetic construct
  REGION 1..16: note = Synthetic
VRHGNFGNSYVSWFAY

SEQ ID NO: 1294 - protein, 125 aa, synthetic construct; identical to SEQ ID NO: 1084
  REGION 1..125: note = Synthetic

SEQ ID NO: 1295 - DNA, 375 bp, synthetic construct; identical to SEQ ID NO: 1085
  misc_feature 1..375: note = Synthetic
  source 1..375: mol_type = other DNA

SEQ ID NO: 1296 - protein, 9 aa, synthetic construct
  REGION 1..9: note = Synthetic
TGAVTTSNY

SEQ ID NO: 1297 - skipped

SEQ ID NO: 1298 - protein, 9 aa, synthetic construct
  REGION 1..9: note = Synthetic
VIWHGSVWV

SEQ ID NO: 1299 - protein, 110 aa, synthetic construct
  REGION 1..110: note = Synthetic
DIQMTQSPSSLSASVGDRVTITCRSSTGAVTTSNYANWVQQKPGKAPKGLIGGTNKRAPGVPARFSGSGSGTDFTLTISSLQPEDFATYYCVIWHGSVWVFGQGTKVEIK

SEQ ID NO: 1300 - DNA, 330 bp, synthetic construct
  misc_feature 1..330: note = Synthetic
  source 1..330: mol_type = other DNA
gatattcaaatgactcaatctccttcttctttatctgcttctgttggtgatcgtgttactattacttgtcgttcttctactggtgctgttactacttctaattatgctaattgggttcaacaaaaacctggtaaagctcctaaaggtttaattggtggtactaataaacgtgctcctggtgttcctgctcgtttttctggttctggttctggtactgattttactttaactatttcttctttacaacctgaagattttgctacttattattgtgttatttggcatggttctgtttgggtttttggtcaaggtactaaagttgaaattaaa

SEQ ID NO: 1301 - protein, 8 aa, synthetic construct
  REGION 1..8: note = Synthetic
GFTFNTYA

SEQ ID NO: 1302 - protein, 10 aa, synthetic construct
  REGION 1..10: note = Synthetic
IRSKYNNYAT

SEQ ID NO: 1303 - protein, 16 aa, synthetic construct
  REGION 1..16: note = Synthetic
VRHGNFGNSYVSWFAY

SEQ ID NO: 1304 - protein, 125 aa, synthetic construct; identical to SEQ ID NO: 1084
  REGION 1..125: note = Synthetic

SEQ ID NO: 1305 - DNA, 375 bp, synthetic construct; identical to SEQ ID NO: 1085
  misc_feature 1..375: note = Synthetic
  source 1..375: mol_type = other DNA

SEQ ID NO: 1306 - protein, 9 aa, synthetic construct
  REGION 1..9: note = Synthetic
TGAVTTSNY

SEQ ID NO: 1307 - skipped

SEQ ID NO: 1308 - protein, 9 aa, synthetic construct
  REGION 1..9: note = Synthetic
ANWKSNILV

SEQ ID NO: 1309 - protein, 110 aa, synthetic construct
  REGION 1..110: note = Synthetic
DIQMTQSPSSLSASVGDRVTITCRSSTGAVTTSNYANWVQQKPGKAPKGLIGGTNKRAPGVPARFSGSGSGTDFTLTISSLQPEDFATYYCANWKSNILVFGQGTKVEIK

SEQ ID NO: 1310 - DNA, 330 bp, synthetic construct
  misc_feature 1..330: note = Synthetic
  source 1..330: mol_type = other DNA
gatattcaaatgactcaatctccttcttctttatctgcttctgttggtgatcgtgttactattacttgtcgttcttctactggtgctgttactacttctaattatgctaattgggttcaacaaaaacctggtaaagctcctaaaggtttaattggtggtactaataaacgtgctcctggtgttcctgctcgtttttctggttctggttctggtactgattttactttaactatttcttctttacaacctgaagattttgctacttattattgtgctaattggaaatctaatattttagtttttggtcaaggtactaaagttgaaattaaa

SEQ ID NO: 1311 - protein, 8 aa, synthetic construct
  REGION 1..8: note = Synthetic
GFTFNTYA

SEQ ID NO: 1312 - protein, 10 aa, synthetic construct
  REGION 1..10: note = Synthetic
IRSKYNNYAT

SEQ ID NO: 1313 - protein, 16 aa, synthetic construct
  REGION 1..16: note = Synthetic
VRHGNFGNSYVSWFAY

SEQ ID NO: 1314 - protein, 125 aa, synthetic construct; identical to SEQ ID NO: 1084
  REGION 1..125: note = Synthetic

SEQ ID NO: 1315 - DNA, 375 bp, synthetic construct; identical to SEQ ID NO: 1085
  misc_feature 1..375: note = Synthetic
  source 1..375: mol_type = other DNA

SEQ ID NO: 1316 - protein, 9 aa, synthetic construct
  REGION 1..9: note = Synthetic
TGAVTTSNY

SEQ ID NO: 1317 - skipped

SEQ ID NO: 1318 - protein, 9 aa, synthetic construct
  REGION 1..9: note = Synthetic
RIWHSSSWV

SEQ ID NO: 1319 - protein, 110 aa, synthetic construct
  REGION 1..110: note = Synthetic
DIQMTQSPSSLSASVGDRVTITCRSSTGAVTTSNYANWVQQKPGKAPKGLIGGTNKRAPGVPARFSGSGSGTDFTLTISSLQPEDFATYYCRIWHSSSWVFGQGTKVEIK

SEQ ID NO: 1320 - DNA, 330 bp, synthetic construct
  misc_feature 1..330: note = Synthetic
  source 1..330: mol_type = other DNA
gatattcaaatgactcaatctccttcttctttatctgcttctgttggtgatcgtgttactattacttgtcgttcttctactggtgctgttactacttctaattatgctaattgggttcaacaaaaacctggtaaagctcctaaaggtttaattggtggtactaataaacgtgctcctggtgttcctgctcgtttttctggttctggttctggtactgattttactttaactatttcttctttacaacctgaagattttgctacttattattgtcgtatttggcattcttcttcttgggtttttggtcaaggtactaaagttgaaattaaa

SEQ ID NO: 1321 - protein, 8 aa, synthetic construct
  REGION 1..8: note = Synthetic
GFTFNTYA

SEQ ID NO: 1322 - protein, 10 aa, synthetic construct
  REGION 1..10: note = Synthetic
IRSKYNNYAT

SEQ ID NO: 1323 - protein, 16 aa, synthetic construct
  REGION 1..16: note = Synthetic
VRHGNFGNSYVSWFAY

SEQ ID NO: 1324 - protein, 125 aa, synthetic construct; identical to SEQ ID NO: 1084
  REGION 1..125: note = Synthetic

SEQ ID NO: 1325 - DNA, 375 bp, synthetic construct; identical to SEQ ID NO: 1085
  misc_feature 1..375: note = Synthetic
  source 1..375: mol_type = other DNA

SEQ ID NO: 1326 - protein, 9 aa, synthetic construct
  REGION 1..9: note = Synthetic
TGAVTTSNY

SEQ ID NO: 1327 - skipped

SEQ ID NO: 1328 - protein, 9 aa, synthetic construct
  REGION 1..9: note = Synthetic
RLDYSGVWV

SEQ ID NO: 1329 - protein, 110 aa, synthetic construct
  REGION 1..110: note = Synthetic
DIQMTQSPSSLSASVGDRVTITCRSSTGAVTTSNYANWVQQKPGKAPKGLIGGTNKRAPGVPARFSGSGSGTDFTLTISSLQPEDFATYYCRLDYSGVWVFGQGTKVEIK

SEQ ID NO: 1330 - DNA, 330 bp, synthetic construct
  misc_feature 1..330: note = Synthetic
  source 1..330: mol_type = other DNA
gatattcaaatgactcaatctccttcttctttatctgcttctgttggtgatcgtgttactattacttgtcgttcttctactggtgctgttactacttctaattatgctaattgggttcaacaaaaacctggtaaagctcctaaaggtttaattggtggtactaataaacgtgctcctggtgttcctgctcgtttttctggttctggttctggtactgattttactttaactatttcttctttacaacctgaagattttgctacttattattgtcgtttagattattctggtgtttgggtttttggtcaaggtactaaagttgaaattaaa

SEQ ID NO: 1331 - protein, 8 aa, synthetic construct
  REGION 1..8: note = Synthetic
GFTFNTYA

SEQ ID NO: 1332 - protein, 10 aa, synthetic construct
  REGION 1..10: note = Synthetic
IRSKYNNYAT

SEQ ID NO: 1333 - protein, 16 aa, synthetic construct
  REGION 1..16: note = Synthetic
VRHGNFGNSYVSWFAY

SEQ ID NO: 1334 - protein, 125 aa, synthetic construct; identical to SEQ ID NO: 1084
  REGION 1..125: note = Synthetic

SEQ ID NO: 1335 - DNA, 375 bp, synthetic construct; identical to SEQ ID NO: 1085
  misc_feature 1..375: note = Synthetic
  source 1..375: mol_type = other DNA

SEQ ID NO: 1336 - protein, 9 aa, synthetic construct
  REGION 1..9: note = Synthetic
TGAVTTSNY

SEQ ID NO: 1337 - skipped

SEQ ID NO: 1338 - protein, 9 aa, synthetic construct
  REGION 1..9: note = Synthetic
VIWHNLAWV

SEQ ID NO: 1339 - protein, 110 aa, synthetic construct
  REGION 1..110: note = Synthetic
DIQMTQSPSSLSASVGDRVTITCRSSTGAVTTSNYANWVQQKPGKAPKGLIGGTNKRAPGVPARFSGSGSGTDFTLTISSLQPEDFATYYCVIWHNLAWVFGQGTKVEIK

SEQ ID NO: 1340 - DNA, 330 bp, synthetic construct
  misc_feature 1..330: note = Synthetic
  source 1..330: mol_type = other DNA
gatattcaaatgactcaatctccttcttctttatctgcttctgttggtgatcgtgttactattacttgtcgttcttctactggtgctgttactacttctaattatgctaattgggttcaacaaaaacctggtaaagctcctaaaggtttaattggtggtactaataaacgtgctcctggtgttcctgctcgtttttctggttctggttctggtactgattttactttaactatttcttctttacaacctgaagattttgctacttattattgtgttatttggcataatttagcttgggtttttggtcaaggtactaaagttgaaattaaa

SEQ ID NO: 1341 - protein, 8 aa, synthetic construct
  REGION 1..8: note = Synthetic
GFTFNTYA

SEQ ID NO: 1342 - protein, 10 aa, synthetic construct
  REGION 1..10: note = Synthetic
IRSKYNNYAT

SEQ ID NO: 1343 - protein, 16 aa, synthetic construct
  REGION 1..16: note = Synthetic
VRHGNFGNSYVSWFAY

SEQ ID NO: 1344 - protein, 125 aa, synthetic construct; identical to SEQ ID NO: 1084
  REGION 1..125: note = Synthetic

SEQ ID NO: 1345 - DNA, 375 bp, synthetic construct; identical to SEQ ID NO: 1085
  misc_feature 1..375: note = Synthetic
  source 1..375: mol_type = other DNA

SEQ ID NO: 1346 - protein, 9 aa, synthetic construct
  REGION 1..9: note = Synthetic
TGAVTTSNY

SEQ ID NO: 1347 - skipped

SEQ ID NO: 1348 - protein, 9 aa, synthetic construct
  REGION 1..9: note = Synthetic
TIWHSGVWV

SEQ ID NO: 1349 - protein, 110 aa, synthetic construct
  REGION 1..110: note = Synthetic
DIQMTQSPSSLSASVGDRVTITCRSSTGAVTTSNYANWVQQKPGKAPKGLIGGTNKRAPGVPARFSGSGSGTDFTLTISSLQPEDFATYYCTIWHSGVWVFGQGTKVEIK

SEQ ID NO: 1350 - DNA, 330 bp, synthetic construct
  misc_feature 1..330: note = Synthetic
  source 1..330: mol_type = other DNA
gatattcaaatgactcaatctccttcttctttatctgcttctgttggtgatcgtgttactattacttgtcgttcttctactggtgctgttactacttctaattatgctaattgggttcaacaaaaacctggtaaagctcctaaaggtttaattggtggtactaataaacgtgctcctggtgttcctgctcgtttttctggttctggttctggtactgattttactttaactatttcttctttacaacctgaagattttgctacttattattgtactatttggcattctggtgtttgggtttttggtcaaggtactaaagttgaaattaaa

SEQ ID NO: 1351 - protein, 8 aa, synthetic construct
  REGION 1..8: note = Synthetic
GFTFNTYA

SEQ ID NO: 1352 - protein, 10 aa, synthetic construct
  REGION 1..10: note = Synthetic
IRSKYNNYAT

SEQ ID NO: 1353 - protein, 16 aa, synthetic construct
  REGION 1..16: note = Synthetic
VRHGNFGNSYVSWFAY

SEQ ID NO: 1354 - protein, 125 aa, synthetic construct; identical to SEQ ID NO: 1084
  REGION 1..125: note = Synthetic

SEQ ID NO: 1355 - DNA, 375 bp, synthetic construct; identical to SEQ ID NO: 1085
  misc_feature 1..375: note = Synthetic
  source 1..375: mol_type = other DNA

SEQ ID NO: 1356 - protein, 9 aa, synthetic construct
  REGION 1..9: note = Synthetic
TGAVTTSNY

SEQ ID NO: 1357 - skipped

SEQ ID NO: 1358 - protein, 9 aa, synthetic construct
  REGION 1..9: note = Synthetic
AIWPGDAWV

SEQ ID NO: 1359 - protein, 110 aa, synthetic construct
  REGION 1..110: note = Synthetic
DIQMTQSPSSLSASVGDRVTITCRSSTGAVTTSNYANWVQQKPGKAPKGLIGGTNKRAPGVPARFSGSGSGTDFTLTISSLQPEDFATYYCAIWPGDAWVFGQGTKVEIK

SEQ ID NO: 1360 - DNA, 330 bp, synthetic construct
  misc_feature 1..330: note = Synthetic
  source 1..330: mol_type = other DNA
gatattcaaatgactcaatctccttcttctttatctgcttctgttggtgatcgtgttactattacttgtcgttcttctactggtgctgttactacttctaattatgctaattgggttcaacaaaaacctggtaaagctcctaaaggtttaattggtggtactaataaacgtgctcctggtgttcctgctcgtttttctggttctggttctggtactgattttactttaactatttcttctttacaacctgaagattttgctacttattattgtgctatttggcctggtgatgcttgggtttttggtcaaggtactaaagttgaaattaaa

SEQ ID NO: 1361 - protein, 8 aa, synthetic construct
  REGION 1..8: note = Synthetic
GFTFNTYA

SEQ ID NO: 1362 - protein, 10 aa, synthetic construct
  REGION 1..10: note = Synthetic
IRSKYNNYAT

SEQ ID NO: 1363 - protein, 16 aa, synthetic construct
  REGION 1..16: note = Synthetic
VRHGNFGNSYVSWFAY

SEQ ID NO: 1364 - protein, 125 aa, synthetic construct; identical to SEQ ID NO: 1084
  REGION 1..125: note = Synthetic

SEQ ID NO: 1365 - DNA, 375 bp, synthetic construct; identical to SEQ ID NO: 1085
  misc_feature 1..375: note = Synthetic
  source 1..375: mol_type = other DNA

SEQ ID NO: 1366 - protein, 9 aa, synthetic construct
  REGION 1..9: note = Synthetic
TGAVTTSNY

SEQ ID NO: 1367 - skipped

SEQ ID NO: 1368 - protein, 9 aa, synthetic construct
  REGION 1..9: note = Synthetic
LTWHTSAWV

SEQ ID NO: 1369 - protein, 110 aa, synthetic construct
  REGION 1..110: note = Synthetic
DIQMTQSPSSLSASVGDRVTITCRSSTGAVTTSNYANWVQQKPGKAPKGLIGGTNKRAPGVPARFSGSGSGTDFTLTISSLQPEDFATYYCLTWHTSAWVFGQGTKVEIK

SEQ ID NO: 1370 - DNA, 330 bp, synthetic construct
  misc_feature 1..330: note = Synthetic
  source 1..330: mol_type = other DNA
gatattcaaatgactcaatctccttcttctttatctgcttctgttggtgatcgtgttactattacttgtcgttcttctactggtgctgttactacttctaattatgctaattgggttcaacaaaaacctggtaaagctcctaaaggtttaattggtggtactaataaacgtgctcctggtgttcctgctcgtttttctggttctggttctggtactgattttactttaactatttcttctttacaacctgaagattttgctacttattattgtttaacttggcatacttctgcttgggtttttggtcaaggtactaaagttgaaattaaa

SEQ ID NO: 1371 - protein, 8 aa, synthetic construct
  REGION 1..8: note = Synthetic
GFTFNTYA

SEQ ID NO: 1372 - protein, 10 aa, synthetic construct
  REGION 1..10: note = Synthetic
IRSKYNNYAT

SEQ ID NO: 1373 - protein, 16 aa, synthetic construct
  REGION 1..16: note = Synthetic
VRHGNFGNSYVSWFAY

SEQ ID NO: 1374 - protein, 125 aa, synthetic construct; identical to SEQ ID NO: 1084
  REGION 1..125: note = Synthetic

SEQ ID NO: 1375 - DNA, 375 bp, synthetic construct; identical to SEQ ID NO: 1085
  misc_feature 1..375: note = Synthetic
  source 1..375: mol_type = other DNA

SEQ ID NO: 1376 - protein, 9 aa, synthetic construct
  REGION 1..9: note = Synthetic
TGAVTTSNY

SEQ ID NO: 1377 - skipped

SEQ ID NO: 1378 - protein, 9 aa, synthetic construct
  REGION 1..9: note = Synthetic
QAWYSNIGV

SEQ ID NO: 1379 - protein, 110 aa, synthetic construct
  REGION 1..110: note = Synthetic
DIQMTQSPSSLSASVGDRVTITCRSSTGAVTTSNYANWVQQKPGKAPKGLIGGTNKRAPGVPARFSGSGSGTDFTLTISSLQPEDFATYYCQAWYSNIGVFGQGTKVEIK

SEQ ID NO: 1380 - DNA, 330 bp, synthetic construct
  misc_feature 1..330: note = Synthetic
  source 1..330: mol_type = other DNA
gatattcaaatgactcaatctccttcttctttatctgcttctgttggtgatcgtgttactattacttgtcgttcttctactggtgctgttactacttctaattatgctaattgggttcaacaaaaacctggtaaagctcctaaaggtttaattggtggtactaataaacgtgctcctggtgttcctgctcgtttttctggttctggttctggtactgattttactttaactatttcttctttacaacctgaagattttgctacttattattgtcaagcttggtattctaatattggtgtttttggtcaaggtactaaagttgaaattaaa

SEQ ID NO: 1381 - protein, 8 aa, synthetic construct
  REGION 1..8: note = Synthetic
GFTFNTYA

SEQ ID NO: 1382 - protein, 10 aa, synthetic construct
  REGION 1..10: note = Synthetic
IRSKYNNYAT

SEQ ID NO: 1383 - protein, 16 aa, synthetic construct
  REGION 1..16: note = Synthetic
VRHGNFGNSYVSWFAY

SEQ ID NO: 1384 - protein, 125 aa, synthetic construct; identical to SEQ ID NO: 1084
  REGION 1..125: note = Synthetic

SEQ ID NO: 1385 - DNA, 375 bp, synthetic construct; identical to SEQ ID NO: 1085
  misc_feature 1..375: note = Synthetic
  source 1..375: mol_type = other DNA

SEQ ID NO: 1386 - protein, 9 aa, synthetic construct
  REGION 1..9: note = Synthetic
TGAVTTSNY

SEQ ID NO: 1387 - skipped

SEQ ID NO: 1388 - protein, 9 aa, synthetic construct
  REGION 1..9: note = Synthetic
AIWYSTAYI

SEQ ID NO: 1389 - protein, 110 aa, synthetic construct
  REGION 1..110: note = Synthetic
DIQMTQSPSSLSASVGDRVTITCRSSTGAVTTSNYANWVQQKPGKAPKGLIGGTNKRAPGVPARFSGSGSGTDFTLTISSLQPEDFATYYCAIWYSTAYIFGQGTKVEIK

SEQ ID NO: 1390 - DNA, 330 bp, synthetic construct
  misc_feature 1..330: note = Synthetic
  source 1..330: mol_type = other DNA
gatattcaaatgactcaatctccttcttctttatctgcttctgttggtgatcgtgttactattacttgtcgttcttctactggtgctgttactacttctaattatgctaattgggttcaacaaaaacctggtaaagctcctaaaggtttaattggtggtactaataaacgtgctcctggtgttcctgctcgtttttctggttctggttctggtactgattttactttaactatttcttctttacaacctgaagattttgctacttattattgtgctatttggtattctactgcttatatttttggtcaaggtactaaagttgaaattaaa

SEQ ID NO: 1391 - protein, 8 aa, synthetic construct
  REGION 1..8: note = Synthetic
GFTFNTYA

SEQ ID NO: 1392 - protein, 10 aa, synthetic construct
  REGION 1..10: note = Synthetic
IRSKYNNYAT

SEQ ID NO: 1393 - protein, 16 aa, synthetic construct
  REGION 1..16: note = Synthetic
VRHGNFGNSYVSWFAY

SEQ ID NO: 1394 - protein, 125 aa, synthetic construct; identical to SEQ ID NO: 1084
  REGION 1..125: note = Synthetic

SEQ ID NO: 1395 - DNA, 375 bp, synthetic construct; identical to SEQ ID NO: 1085
  misc_feature 1..375: note = Synthetic
  source 1..375: mol_type = other DNA

SEQ ID NO: 1396 - protein, 9 aa, synthetic construct
  REGION 1..9: note = Synthetic
TGAVTTSNY

SEQ ID NO: 1397 - skipped

SEQ ID NO: 1398 - protein, 9 aa, synthetic construct
  REGION 1..9: note = Synthetic
LIWYNNIWV

SEQ ID NO: 1399 - protein, 110 aa, synthetic construct
  REGION 1..110: note = Synthetic
DIQMTQSPSSLSASVGDRVTITCRSSTGAVTTSNYANWVQQKPGKAPKGLIGGTNKRAPGVPARFSGSGSGTDFTLTISSLQPEDFATYYCLIWYNNIWVFGQGTKVEIK

SEQ ID NO: 1400 - DNA, 330 bp, synthetic construct
  misc_feature 1..330: note = Synthetic
  source 1..330: mol_type = other DNA
gatattcaaatgactcaatctccttcttctttatctgcttctgttggtgatcgtgttactattacttgtcgttcttctactggtgctgttactacttctaattatgctaattgggttcaacaaaaacctggtaaagctcctaaaggtttaattggtggtactaataaacgtgctcctggtgttcctgctcgtttttctggttctggttctggtactgattttactttaactatttcttctttacaacctgaagattttgctacttattattgtttaatttggtataataatatttgggtttttggtcaaggtactaaagttgaaattaaa

SEQ ID NO: 1401 - protein, 8 aa, synthetic construct
  REGION 1..8: note = Synthetic
GFTFNTYA

SEQ ID NO: 1402 - protein, 10 aa, synthetic construct
  REGION 1..10: note = Synthetic
IRSKYNNYAT

SEQ ID NO: 1403 - protein, 16 aa, synthetic construct
  REGION 1..16: note = Synthetic
VRHGNFGNSYVSWFAY

SEQ ID NO: 1404 - protein, 125 aa, synthetic construct; identical to SEQ ID NO: 1084
  REGION 1..125: note = Synthetic

SEQ ID NO: 1405 - DNA, 375 bp, synthetic construct; identical to SEQ ID NO: 1085
  misc_feature 1..375: note = Synthetic
  source 1..375: mol_type = other DNA

SEQ ID NO: 1406 - protein, 9 aa, synthetic construct
  REGION 1..9: note = Synthetic
TGAVTTSNY

SEQ ID NO: 1407 - skipped

SEQ ID NO: 1408 - protein, 9 aa, synthetic construct
  REGION 1..9: note = Synthetic
RVWHSDAWV

SEQ ID NO: 1409 - protein, 110 aa, synthetic construct
  REGION 1..110: note = Synthetic
DIQMTQSPSSLSASVGDRVTITCRSSTGAVTTSNYANWVQQKPGKAPKGLIGGTNKRAPGVPARFSGSGSGTDFTLTISSLQPEDFATYYCRVWHSDAWVFGQGTKVEIK

SEQ ID NO: 1410 - DNA, 330 bp, synthetic construct
  misc_feature 1..330: note = Synthetic
  source 1..330: mol_type = other DNA
gatattcaaatgactcaatctccttcttctttatctgcttctgttggtgatcgtgttactattacttgtcgttcttctactggtgctgttactacttctaattatgctaattgggttcaacaaaaacctggtaaagctcctaaaggtttaattggtggtactaataaacgtgctcctggtgttcctgctcgtttttctggttctggttctggtactgattttactttaactatttcttctttacaacctgaagattttgctacttattattgtcgtgtttggcattctgatgcttgggtttttggtcaaggtactaaagttgaaattaaa

SEQ ID NO: 1411 - protein, 8 aa, synthetic construct
  REGION 1..8: note = Synthetic
GFTFNTYA

SEQ ID NO: 1412 - protein, 10 aa, synthetic construct
  REGION 1..10: note = Synthetic
IRSKYNNYAT

SEQ ID NO: 1413 - protein, 16 aa, synthetic construct
  REGION 1..16: note = Synthetic
VRHGNFGNSYVSWFAY

SEQ ID NO: 1414 - protein, 125 aa, synthetic construct; identical to SEQ ID NO: 1084
  REGION 1..125: note = Synthetic

SEQ ID NO: 1415 - DNA, 375 bp, synthetic construct; identical to SEQ ID NO: 1085
  misc_feature 1..375: note = Synthetic
  source 1..375: mol_type = other DNA

SEQ ID NO: 1416 - protein, 9 aa, synthetic construct
  REGION 1..9: note = Synthetic
TGAVTTSNY

SEQ ID NO: 1417 - skipped

SEQ ID NO: 1418 - protein, 9 aa, synthetic construct
  REGION 1..9: note = Synthetic
LIWYGSAWV

SEQ ID NO: 1419 - protein, 110 aa, synthetic construct
  REGION 1..110: note = Synthetic
DIQMTQSPSSLSASVGDRVTITCRSSTGAVTTSNYANWVQQKPGKAPKGLIGGTNKRAPGVPARFSGSGSGTDFTLTISSLQPEDFATYYCLIWYGSAWVFGQGTKVEIK

SEQ ID NO: 1420 - DNA, 330 bp, synthetic construct
  misc_feature 1..330: note = Synthetic
  source 1..330: mol_type = other DNA
gatattcaaatgactcaatctccttcttctttatctgcttctgttggtgatcgtgttactattacttgtcgttcttctactggtgctgttactacttctaattatgctaattgggttcaacaaaaacctggtaaagctcctaaaggtttaattggtggtactaataaacgtgctcctggtgttcctgctcgtttttctggttctggttctggtactgattttactttaactatttcttctttacaacctgaagattttgctacttattattgtttaatttggtatggttctgcttgggtttttggtcaaggtactaaagttgaaattaaa

SEQ ID NO: 1421 - protein, 8 aa, synthetic construct
  REGION 1..8: note = Synthetic
GFTFNTYA

SEQ ID NO: 1422 - protein, 10 aa, synthetic construct
  REGION 1..10: note = Synthetic
IRSKYNNYAT

SEQ ID NO: 1423 - protein, 16 aa, synthetic construct
  REGION 1..16: note = Synthetic
VRHGNFGNSYVSWFAY

SEQ ID NO: 1424 - protein, 125 aa, synthetic construct; identical to SEQ ID NO: 1084
  REGION 1..125: note = Synthetic

SEQ ID NO: 1425 - DNA, 375 bp, synthetic construct; identical to SEQ ID NO: 1085
  misc_feature 1..375: note = Synthetic
  source 1..375: mol_type = other DNA

SEQ ID NO: 1426 - protein, 9 aa, synthetic construct
  REGION 1..9: note = Synthetic
TGAVTTSNY

SEQ ID NO: 1427 - skipped

SEQ ID NO: 1428 - protein, 9 aa, synthetic construct
  REGION 1..9: note = Synthetic
AAWDVSLWV

SEQ ID NO: 1429 - protein, 110 aa, synthetic construct
  REGION 1..110: note = Synthetic
DIQMTQSPSSLSASVGDRVTITCRSSTGAVTTSNYANWVQQKPGKAPKGLIGGTNKRAPGVPARFSGSGSGTDFTLTISSLQPEDFATYYCAAWDVSLWVFGQGTKVEIK

SEQ ID NO: 1430 - DNA, 330 bp, synthetic construct
  misc_feature 1..330: note = Synthetic
  source 1..330: mol_type = other DNA
gatattcaaatgactcaatctccttcttctttatctgcttctgttggtgatcgtgttactattacttgtcgttcttctactggtgctgttactacttctaattatgctaattgggttcaacaaaaacctggtaaagctcctaaaggtttaattggtggtactaataaacgtgctcctggtgttcctgctcgtttttctggttctggttctggtactgattttactttaactatttcttctttacaacctgaagattttgctacttattattgtgctgcttgggatgtttctttatgggtttttggtcaaggtactaaagttgaaattaaa

SEQ ID NO: 1431 - protein, 8 aa, synthetic construct
  REGION 1..8: note = Synthetic
GFTFNTYA

SEQ ID NO: 1432 - protein, 10 aa, synthetic construct
  REGION 1..10: note = Synthetic
IRSKYNNYAT

SEQ ID NO: 1433 - protein, 16 aa, synthetic construct
  REGION 1..16: note = Synthetic
VRHGNFGNSYVSWFAY

SEQ ID NO: 1434 - protein, 125 aa, synthetic construct; identical to SEQ ID NO: 1084
  REGION 1..125: note = Synthetic

SEQ ID NO: 1435 - DNA, 375 bp, synthetic construct; identical to SEQ ID NO: 1085
  misc_feature 1..375: note = Synthetic
  source 1..375: mol_type = other DNA

SEQ ID NO: 1436 - protein, 9 aa, synthetic construct
  REGION 1..9: note = Synthetic
TGAVTTSNY

SEQ ID NO: 1437 - skipped

SEQ ID NO: 1438 - protein, 9 aa, synthetic construct
  REGION 1..9: note = Synthetic
AAWHDNAWV

SEQ ID NO: 1439 - protein, 110 aa, synthetic construct
  REGION 1..110: note = Synthetic
DIQMTQSPSSLSASVGDRVTITCRSSTGAVTTSNYANWVQQKPGKAPKGLIGGTNKRAPGVPARFSGSGSGTDFTLTISSLQPEDFATYYCAAWHDNAWVFGQGTKVEIK

SEQ ID NO: 1440 - DNA, 330 bp, synthetic construct
  misc_feature 1..330: note = Synthetic
  source 1..330: mol_type = other DNA
gatattcaaatgactcaatctccttcttctttatctgcttctgttggtgatcgtgttactattacttgtcgttcttctactggtgctgttactacttctaattatgctaattgggttcaacaaaaacctggtaaagctcctaaaggtttaattggtggtactaataaacgtgctcctggtgttcctgctcgtttttctggttctggttctggtactgattttactttaactatttcttctttacaacctgaagattttgctacttattattgtgctgcttggcatgataatgcttgggtttttggtcaaggtactaaagttgaaattaaa

SEQ ID NO: 1441 - protein, 8 aa, synthetic construct
  REGION 1..8: note = Synthetic
GFTFNTYA

SEQ ID NO: 1442 - protein, 10 aa, synthetic construct
  REGION 1..10: note = Synthetic
IRSKYNNYAT

SEQ ID NO: 1443 - protein, 16 aa, synthetic construct
  REGION 1..16: note = Synthetic
VRHGNFGNSYVSWFAY

SEQ ID NO: 1444 - protein, 125 aa, synthetic construct; identical to SEQ ID NO: 1084
  REGION 1..125: note = Synthetic

SEQ ID NO: 1445 - DNA, 375 bp, synthetic construct; identical to SEQ ID NO: 1085
  misc_feature 1..375: note = Synthetic
  source 1..375: mol_type = other DNA

SEQ ID NO: 1446 - protein, 9 aa, synthetic construct
  REGION 1..9: note = Synthetic
TGAVTTSNY

SEQ ID NO: 1447 - skipped

SEQ ID NO: 1448 - protein, 9 aa, synthetic construct
  REGION 1..9: note = Synthetic
QPYYSNNWV

SEQ ID NO: 1449 - protein, 110 aa, synthetic construct
  REGION 1..110: note = Synthetic
DIQMTQSPSSLSASVGDRVTITCRSSTGAVTTSNYANWVQQKPGKAPKGLIGGTNKRAPGVPARFSGSGSGTDFTLTISSLQPEDFATYYCQPYYSNNWVFGQGTKVEIK

SEQ ID NO: 1450 - DNA, 330 bp, synthetic construct
  misc_feature 1..330: note = Synthetic
  source 1..330: mol_type = other DNA
gatattcaaatgactcaatctccttcttctttatctgcttctgttggtgatcgtgttactattacttgtcgttcttctactggtgctgttactacttctaattatgctaattgggttcaacaaaaacctggtaaagctcctaaaggtttaattggtggtactaataaacgtgctcctggtgttcctgctcgtttttctggttctggttctggtactgattttactttaactatttcttctttacaacctgaagattttgctacttattattgtcaaccttattattctaataattgggtttttggtcaaggtactaaagttgaaattaaa

SEQ ID NO: 1451 - protein, 8 aa, synthetic construct
  REGION 1..8: note = Synthetic
GFTFNTYA

SEQ ID NO: 1452 - protein, 10 aa, synthetic construct
  REGION 1..10: note = Synthetic
IRSKYNNYAT

SEQ ID NO: 1453 - protein, 16 aa, synthetic construct
  REGION 1..16: note = Synthetic
VRHGNFGNSYVSWFAY

SEQ ID NO: 1454 - protein, 125 aa, synthetic construct; identical to SEQ ID NO: 1084
  REGION 1..125: note = Synthetic

SEQ ID NO: 1455 - DNA, 375 bp, synthetic construct; identical to SEQ ID NO: 1085
  misc_feature 1..375: note = Synthetic
  source 1..375: mol_type = other DNA

SEQ ID NO: 1456 - protein, 9 aa, synthetic construct
  REGION 1..9: note = Synthetic
TGAVTTSNY

SEQ ID NO: 1457 - skipped

SEQ ID NO: 1458 - protein, 9 aa, synthetic construct
  REGION 1..9: note = Synthetic
QAWDRSIWV

SEQ ID NO: 1459 - protein, 110 aa, synthetic construct
  REGION 1..110: note = Synthetic
DIQMTQSPSSLSASVGDRVTITCRSSTGAVTTSNYANWVQQKPGKAPKGLIGGTNKRAPGVPARFSGSGSGTDFTLTISSLQPEDFATYYCQAWDRSIWVFGQGTKVEIK

SEQ ID NO: 1460 - DNA, 330 bp, synthetic construct
  misc_feature 1..330: note = Synthetic
  source 1..330: mol_type = other DNA
gatattcaaatgactcaatctccttcttctttatctgcttctgttggtgatcgtgttactattacttgtcgttcttctactggtgctgttactacttctaattatgctaattgggttcaacaaaaacctggtaaagctcctaaaggtttaattggtggtactaataaacgtgctcctggtgttcctgctcgtttttctggttctggttctggtactgattttactttaactatttcttctttacaacctgaagattttgctacttattattgtcaagcttgggatcgttctatttgggtttttggtcaaggtactaaagttgaaattaaa

SEQ ID NO: 1461 - protein, 8 aa, synthetic construct
  REGION 1..8: note = Synthetic
GFTFNTYA

SEQ ID NO: 1462 - protein, 10 aa, synthetic construct
  REGION 1..10: note = Synthetic
IRSKYNNYAT

SEQ ID NO: 1463 - protein, 16 aa, synthetic construct
  REGION 1..16: note = Synthetic
VRHGNFGNSYVSWFAY

SEQ ID NO: 1464 - protein, 125 aa, synthetic construct; identical to SEQ ID NO: 1084
  REGION 1..125: note = Synthetic

SEQ ID NO: 1465 - DNA, 375 bp, synthetic construct; identical to SEQ ID NO: 1085
  misc_feature 1..375: note = Synthetic
  source 1..375: mol_type = other DNA

SEQ ID NO: 1466 - protein, 9 aa, synthetic construct
  REGION 1..9: note = Synthetic
TGAVTTSNY

SEQ ID NO: 1467 - skipped

SEQ ID NO: 1468 - protein, 9 aa, synthetic construct
  REGION 1..9: note = Synthetic
LLYYGSIWV

SEQ ID NO: 1469 - protein, 110 aa, synthetic construct
  REGION 1..110: note = Synthetic
DIQMTQSPSSLSASVGDRVTITCRSSTGAVTTSNYANWVQQKPGKAPKGLIGGTNKRAPGVPARFSGSGSGTDFTLTISSLQPEDFATYYCLLYYGSIWVFGQGTKVEIK

SEQ ID NO: 1470 - DNA, 330 bp, synthetic construct
  misc_feature 1..330: note = Synthetic
  source 1..330: mol_type = other DNA
gatattcaaatgactcaatctccttcttctttatctgcttctgttggtgatcgtgttactattacttgtcgttcttctactggtgctgttactacttctaattatgctaattgggttcaacaaaaacctggtaaagctcctaaaggtttaattggtggtactaataaacgtgctcctggtgttcctgctcgtttttctggttctggttctggtactgattttactttaactatttcttctttacaacctgaagattttgctacttattattgtttattatattatggttctatttgggtttttggtcaaggtactaaagttgaaattaaa

SEQ ID NO: 1471 - protein, 8 aa, synthetic construct
  REGION 1..8: note = Synthetic
GFTFNTYA

SEQ ID NO: 1472 - protein, 10 aa, synthetic construct
  REGION 1..10: note = Synthetic
IRSKYNNYAT

SEQ ID NO: 1473 - protein, 16 aa, synthetic construct
  REGION 1..16: note = Synthetic
VRHGNFGNSYVSWFAY

SEQ ID NO: 1474 - protein, 125 aa, synthetic construct; identical to SEQ ID NO: 1084
  REGION 1..125: note = Synthetic

SEQ ID NO: 1475 - DNA, 375 bp, synthetic construct; identical to SEQ ID NO: 1085
  misc_feature 1..375: note = Synthetic
  source 1..375: mol_type = other DNA

SEQ ID NO: 1476 - protein, 9 aa, synthetic construct
  REGION 1..9: note = Synthetic
TGAVTTSNY

SEQ ID NO: 1477 - skipped

SEQ ID NO: 1478 - protein, 9 aa, synthetic construct
  REGION 1..9: note = Synthetic
AIWYDNIWV

SEQ ID NO: 1479 - protein, 110 aa, synthetic construct
  REGION 1..110: note = Synthetic
DIQMTQSPSSLSASVGDRVTITCRSSTGAVTTSNYANWVQQKPGKAPKGLIGGTNKRAPGVPARFSGSGSGTDFTLTISSLQPEDFATYYCAIWYDNIWVFGQGTKVEIK

SEQ ID NO: 1480 - DNA, 330 bp, synthetic construct
  misc_feature 1..330: note = Synthetic
  source 1..330: mol_type = other DNA
gatattcaaatgactcaatctccttcttctttatctgcttctgttggtgatcgtgttactattacttgtcgttcttctactggtgctgttactacttctaattatgctaattgggttcaacaaaaacctggtaaagctcctaaaggtttaattggtggtactaataaacgtgctcctggtgttcctgctcgtttttctggttctggttctggtactgattttactttaactatttcttctttacaacctgaagattttgctacttattattgtgctatttggtatgataatatttgggtttttggtcaaggtactaaagttgaaattaaa

SEQ ID NO: 1481 - protein, 8 aa, synthetic construct
  REGION 1..8: note = Synthetic
GFTFNTYA

SEQ ID NO: 1482 - protein, 10 aa, synthetic construct
  REGION 1..10: note = Synthetic
IRSKYNNYAT

SEQ ID NO: 1483 - protein, 16 aa, synthetic construct
  REGION 1..16: note = Synthetic
VRHGNFGNSYVSWFAY

SEQ ID NO: 1484 - protein, 125 aa, synthetic construct; identical to SEQ ID NO: 1084
  REGION 1..125: note = Synthetic

SEQ ID NO: 1485 - DNA, 375 bp, synthetic construct; identical to SEQ ID NO: 1085
  misc_feature 1..375: note = Synthetic
  source 1..375: mol_type = other DNA

SEQ ID NO: 1486 - protein, 9 aa, synthetic construct
  REGION 1..9: note = Synthetic
TGAVTTSNY

SEQ ID NO: 1487 - skipped

SEQ ID NO: 1488 - protein, 9 aa, synthetic construct
  REGION 1..9: note = Synthetic
LSWHSSSWV

SEQ ID NO: 1489 - protein, 110 aa, synthetic construct
  REGION 1..110: note = Synthetic
DIQMTQSPSSLSASVGDRVTITCRSSTGAVTTSNYANWVQQKPGKAPKGLIGGTNKRAPGVPARFSGSGSGTDFTLTISSLQPEDFATYYCLSWHSSSWVFGQGTKVEIK

SEQ ID NO: 1490 - DNA, 330 bp, synthetic construct
  misc_feature 1..330: note = Synthetic
  source 1..330: mol_type = other DNA
gatattcaaatgactcaatctccttcttctttatctgcttctgttggtgatcgtgttactattacttgtcgttcttctactggtgctgttactacttctaattatgctaattgggttcaacaaaaacctggtaaagctcctaaaggtttaattggtggtactaataaacgtgctcctggtgttcctgctcgtttttctggttctggttctggtactgattttactttaactatttcttctttacaacctgaagattttgctacttattattgtttatcttggcattcttcttcttgggtttttggtcaaggtactaaagttgaaattaaa

SEQ ID NO: 1491 - protein, 8 aa, synthetic construct
  REGION 1..8: note = Synthetic
GFTFNTYA

SEQ ID NO: 1492 - protein, 10 aa, synthetic construct
  REGION 1..10: note = Synthetic
IRSKYNNYAT

SEQ ID NO: 1493 - protein, 16 aa, synthetic construct
  REGION 1..16: note = Synthetic
VRHGNFGNSYVSWFAY

SEQ ID NO: 1494 - protein, 125 aa, synthetic construct; identical to SEQ ID NO: 1084
  REGION 1..125: note = Synthetic

SEQ ID NO: 1495 - DNA, 375 bp, synthetic construct; identical to SEQ ID NO: 1085
  misc_feature 1..375: note = Synthetic
  source 1..375: mol_type = other DNA

SEQ ID NO: 1496 - protein, 9 aa, synthetic construct
  REGION 1..9: note = Synthetic
TGAVTTSNY

SEQ ID NO: 1497 - skipped

SEQ ID NO: 1498 - protein, 9 aa, synthetic construct
  REGION 1..9: note = Synthetic
LIWQTSAWV

SEQ ID NO: 1499 - protein, 110 aa, synthetic construct
  REGION 1..110: note = Synthetic
DIQMTQSPSSLSASVGDRVTITCRSSTGAVTTSNYANWVQQKPGKAPKGLIGGTNKRAPGVPARFSGSGSGTDFTLTISSLQPEDFATYYCLIWQTSAWVFGQGTKVEIK

SEQ ID NO: 1500 - DNA, 330 bp, synthetic construct
  misc_feature 1..330: note = Synthetic
  source 1..330: mol_type = other DNA
gatattcaaatgactcaatctccttcttctttatctgcttctgttggtgatcgtgttactattacttgtcgttcttctactggtgctgttactacttctaattatgctaattgggttcaacaaaaacctggtaaagctcctaaaggtttaattggtggtactaataaacgtgctcctggtgttcctgctcgtttttctggttctggttctggtactgattttactttaactatttcttctttacaacctgaagattttgctacttattattgtttaatttggcaaacttctgcttgggtttttggtcaaggtactaaagttgaaattaaa

SEQ ID NO: 1501 - protein, 8 aa, synthetic construct
  REGION 1..8: note = Synthetic
DFTFETYA

SEQ ID NO: 1502 - protein, 10 aa, synthetic construct
  REGION 1..10: note = Synthetic
IRSKYNNYAT

SEQ ID NO: 1503 - protein, 16 aa, synthetic construct
  REGION 1..16: note = Synthetic
VRHGNFGNSYVSWFAY

SEQ ID NO: 1504 - protein, 125 aa, synthetic construct; identical to SEQ ID NO: 704
  REGION 1..125: note = Synthetic

SEQ ID NO: 1505 - DNA, 375 bp, synthetic construct; identical to SEQ ID NO: 705
  misc_feature 1..375: note = Synthetic
  source 1..375: mol_type = other DNA

SEQ ID NO: 1506 - protein, 9 aa, synthetic construct
  REGION 1..9: note = Synthetic
TGAVTPSNY

SEQ ID NO: 1507 - skipped

SEQ ID NO: 1508 - protein, 9 aa, synthetic construct
  REGION 1..9: note = Synthetic
ALWYSNLWV

SEQ ID NO: 1509 - protein, 110 aa, synthetic construct; identical to SEQ ID NO: 1139
  REGION 1..110: note = Synthetic

SEQ ID NO: 1510 - DNA, 330 bp, synthetic construct; identical to SEQ ID NO: 1140
  misc_feature 1..330: note = Synthetic
  source 1..330: mol_type = other DNA

SEQ ID NO: 1511 - protein, 8 aa, synthetic construct
  REGION 1..8: note = Synthetic
DFTFETYA

SEQ ID NO: 1512 - protein, 10 aa, synthetic construct
  REGION 1..10: note = Synthetic
IRSKYNNYAT

SEQ ID NO: 1513 - protein, 16 aa, synthetic construct
  REGION 1..16: note = Synthetic
VRHGNFGNSYVSWFAY

SEQ ID NO: 1514 - protein, 125 aa, synthetic construct; identical to SEQ ID NO: 704
  REGION 1..125: note = Synthetic

SEQ ID NO: 1515 - DNA, 375 bp, synthetic construct; identical to SEQ ID NO: 705
  misc_feature 1..375: note = Synthetic
  source 1..375: mol_type = other DNA

SEQ ID NO: 1516 - protein, 9 aa, synthetic construct
  REGION 1..9: note = Synthetic
TGAVTTSNY

SEQ ID NO: 1517 - skipped

SEQ ID NO: 1518 - protein, 9 aa, synthetic construct
  REGION 1..9: note = Synthetic
ALWYSNLWV

SEQ ID NO: 1519 - protein, 110 aa, synthetic construct; identical to SEQ ID NO: 1179
  REGION 1..110: note = Synthetic

SEQ ID NO: 1520 - DNA, 330 bp, synthetic construct; identical to SEQ ID NO: 1180
  misc_feature 1..330: note = Synthetic
  source 1..330: mol_type = other DNA

SEQ ID NO: 1521 - protein, 8 aa, synthetic construct
  REGION 1..8: note = Synthetic
DFTFETYA

SEQ ID NO: 1522 - protein, 10 aa, synthetic construct
  REGION 1..10: note = Synthetic
IRSKYNNYAT

SEQ ID NO: 1523 - protein, 16 aa, synthetic construct
  REGION 1..16: note = Synthetic
VRHGNFGNSYVSWFAY

SEQ ID NO: 1524 - protein, 125 aa, synthetic construct; identical to SEQ ID NO: 704
  REGION 1..125: note = Synthetic

SEQ ID NO: 1525 - DNA, 375 bp, synthetic construct; identical to SEQ ID NO: 705
  misc_feature 1..375: note = Synthetic
  source 1..375: mol_type = other DNA

SEQ ID NO: 1526 - protein, 9 aa, synthetic construct
  REGION 1..9: note = Synthetic
TGAVTTSNY

SEQ ID NO: 1527 - skipped

SEQ ID NO: 1528 - protein, 9 aa, synthetic construct
  REGION 1..9: note = Synthetic
VIWHNLAWV

SEQ ID NO: 1529 - protein, 110 aa, synthetic construct; identical to SEQ ID NO: 1339
  REGION 1..110: note = Synthetic

SEQ ID NO: 1530 - DNA, 330 bp, synthetic construct; identical to SEQ ID NO: 1340
  misc_feature 1..330: note = Synthetic
  source 1..330: mol_type = other DNA

SEQ ID NO: 1531 - protein, 8 aa, synthetic construct
  REGION 1..8: note = Synthetic
EFTFETYA

SEQ ID NO: 1532 - protein, 10 aa, synthetic construct
  REGION 1..10: note = Synthetic
IRSKYNNYAT

SEQ ID NO: 1533 - protein, 16 aa, synthetic construct
  REGION 1..16: note = Synthetic
VRHGNFGNSYVSWFAY

SEQ ID NO: 1534 - protein, 125 aa, synthetic construct; identical to SEQ ID NO: 764
  REGION 1..125: note = Synthetic

SEQ ID NO: 1535 - DNA, 375 bp, synthetic construct; identical to SEQ ID NO: 765
  misc_feature 1..375: note = Synthetic
  source 1..375: mol_type = other DNA

SEQ ID NO: 1536 - protein, 9 aa, synthetic construct
  REGION 1..9: note = Synthetic
TGAVPTSNY

SEQ ID NO: 1537 - skipped

SEQ ID NO: 1538 - protein, 9 aa, synthetic construct
  REGION 1..9: note = Synthetic
ALWYSNLWV

SEQ ID NO: 1539 - protein, 110 aa, synthetic construct; identical to SEQ ID NO: 1119
  REGION 1..110: note = Synthetic

SEQ ID NO: 1540 - DNA, 330 bp, synthetic construct; identical to SEQ ID NO: 1120
  misc_feature 1..330: note = Synthetic
  source 1..330: mol_type = other DNA

SEQ ID NO: 1541 - protein, 8 aa, synthetic construct
  REGION 1..8: note = Synthetic
GFAFNAYA

SEQ ID NO: 1542 - protein, 10 aa, synthetic construct
  REGION 1..10: note = Synthetic
IRSKYNNYAT

SEQ ID NO: 1543 - protein, 16 aa, synthetic construct
  REGION 1..16: note = Synthetic
VRHGNFGNSYVSWFAY

SEQ ID NO: 1544 - protein, 125 aa, synthetic construct; identical to SEQ ID NO: 694
  REGION 1..125: note = Synthetic

SEQ ID NO: 1545 - DNA, 375 bp, synthetic construct; identical to SEQ ID NO: 695
  misc_feature 1..375: note = Synthetic
  source 1..375: mol_type = other DNA

SEQ ID NO: 1546 - protein, 9 aa, synthetic construct
  REGION 1..9: note = Synthetic
TGAVPTSLY

SEQ ID NO: 1547 - skipped

SEQ ID NO: 1548 - protein, 9 aa, synthetic construct
  REGION 1..9: note = Synthetic
ALWYSNLWV

SEQ ID NO: 1549 - protein, 110 aa, synthetic construct; identical to SEQ ID NO: 1129
  REGION 1..110: note = Synthetic

SEQ ID NO: 1550 - DNA, 330 bp, synthetic construct; identical to SEQ ID NO: 1130
  misc_feature 1..330: note = Synthetic
  source 1..330: mol_type = other DNA

SEQ ID NO: 1551 - protein, 8 aa, synthetic construct
  REGION 1..8: note = Synthetic
GFAFNAYA

SEQ ID NO: 1552 - protein, 10 aa, synthetic construct
  REGION 1..10: note = Synthetic
IRSKYNNYAT

SEQ ID NO: 1553 - protein, 16 aa, synthetic construct
  REGION 1..16: note = Synthetic
VRHGNFGNSYVSWFAY

SEQ ID NO: 1554 - protein, 125 aa, synthetic construct; identical to SEQ ID NO: 694
  REGION 1..125: note = Synthetic

SEQ ID NO: 1555 - DNA, 375 bp, synthetic construct; identical to SEQ ID NO: 695
  misc_feature 1..375: note = Synthetic
  source 1..375: mol_type = other DNA

SEQ ID NO: 1556 - protein, 9 aa, synthetic construct
  REGION 1..9: note = Synthetic
TGAVPTSNY

SEQ ID NO: 1557 - skipped

SEQ ID NO: 1558 - protein, 9 aa, synthetic construct
  REGION 1..9: note = Synthetic
ALWYSNLWV

SEQ ID NO: 1559 - protein, 110 aa, synthetic construct; identical to SEQ ID NO: 1119
  REGION 1..110: note = Synthetic

SEQ ID NO: 1560 - DNA, 330 bp, synthetic construct; identical to SEQ ID NO: 1120
  misc_feature 1..330: note = Synthetic
  source 1..330: mol_type = other DNA

SEQ ID NO: 1561 - protein, 8 aa, synthetic construct
  REGION 1..8: note = Synthetic
GFAFNAYA

SEQ ID NO: 1562 - protein, 10 aa, synthetic construct
  REGION 1..10: note = Synthetic
IRSKYNNYAT

SEQ ID NO: 1563 - protein, 16 aa, synthetic construct
  REGION 1..16: note = Synthetic
VRHGNFGNSYVSWFAY

SEQ ID NO: 1564 - protein, 125 aa, synthetic construct; identical to SEQ ID NO: 694
  REGION 1..125: note = Synthetic

SEQ ID NO: 1565 - DNA, 375 bp, synthetic construct; identical to SEQ ID NO: 695
  misc_feature 1..375: note = Synthetic
  source 1..375: mol_type = other DNA

SEQ ID NO: 1566 - protein, 9 aa, synthetic construct
  REGION 1..9: note = Synthetic
TGAVTTSNY

SEQ ID NO: 1567 - skipped

SEQ ID NO: 1568 - protein, 9 aa, synthetic construct
  REGION 1..9: note = Synthetic
LSWHSSSWV

SEQ ID NO: 1569 - protein, 110 aa, synthetic construct; identical to SEQ ID NO: 1489
  REGION 1..110: note = Synthetic

SEQ ID NO: 1570 - DNA, 330 bp, synthetic construct; identical to SEQ ID NO: 1490
  misc_feature 1..330: note = Synthetic
  source 1..330: mol_type = other DNA

SEQ ID NO: 1571 - protein, 8 aa, synthetic construct
  REGION 1..8: note = Synthetic
GFAFNAYA

SEQ ID NO: 1572 - protein, 10 aa, synthetic construct
  REGION 1..10: note = Synthetic
IRSKYNNYAT

SEQ ID NO: 1573 - protein, 16 aa, synthetic construct
  REGION 1..16: note = Synthetic
VRHGNFGNSYVSWFAY

SEQ ID NO: 1574 - protein, 125 aa, synthetic construct; identical to SEQ ID NO: 694
  REGION 1..125: note = Synthetic

SEQ ID NO: 1575 - DNA, 375 bp, synthetic construct; identical to SEQ ID NO: 695
  misc_feature 1..375: note = Synthetic
  source 1..375: mol_type = other DNA

SEQ ID NO: 1576 - protein, 9 aa, synthetic construct
  REGION 1..9: note = Synthetic
TGAVTTSNY

SEQ ID NO: 1577 - skipped

SEQ ID NO: 1578 - protein, 9 aa, synthetic construct
  REGION 1..9: note = Synthetic
VIWHNLAWV

SEQ ID NO: 1579 - protein, 110 aa, synthetic construct; identical to SEQ ID NO: 1339
  REGION 1..110: note = Synthetic

SEQ ID NO: 1580 - DNA, 330 bp, synthetic construct; identical to SEQ ID NO: 1340
  misc_feature 1..330: note = Synthetic
  source 1..330: mol_type = other DNA

SEQ ID NO: 1581 - protein, 8 aa, synthetic construct
  REGION 1..8: note = Synthetic
GFDFNAYA

SEQ ID NO: 1582 - protein, 10 aa, synthetic construct
  REGION 1..10: note = Synthetic
IRSKYNNYAT

SEQ ID NO: 1583 - protein, 16 aa, synthetic construct
  REGION 1..16: note = Synthetic
VRHGNFGNSYVSWFAY

SEQ ID NO: 1584 - protein, 125 aa, synthetic construct; identical to SEQ ID NO: 724
  REGION 1..125: note = Synthetic

SEQ ID NO: 1585 - DNA, 375 bp, synthetic construct; identical to SEQ ID NO: 725
  misc_feature 1..375: note = Synthetic
  source 1..375: mol_type = other DNA

SEQ ID NO: 1586 - protein, 9 aa, synthetic construct
  REGION 1..9: note = Synthetic
GGSVTTHNY

SEQ ID NO: 1587 - skipped

SEQ ID NO: 1588 - protein, 9 aa, synthetic construct
  REGION 1..9: note = Synthetic
ALWYSNLWV

SEQ ID NO: 1589 - protein, 110 aa, synthetic construct; identical to SEQ ID NO: 1149
  REGION 1..110: note = Synthetic

SEQ ID NO: 1590 - DNA, 330 bp, synthetic construct; identical to SEQ ID NO: 1150
  misc_feature 1..330: note = Synthetic
  source 1..330: mol_type = other DNA

SEQ ID NO: 1591 - protein, 8 aa, synthetic construct
  REGION 1..8: note = Synthetic
GFDFNAYA

SEQ ID NO: 1592 - protein, 10 aa, synthetic construct
  REGION 1..10: note = Synthetic
IRSKYNNYAT

SEQ ID NO: 1593 - protein, 16 aa, synthetic construct
  REGION 1..16: note = Synthetic
VRHGNFGNSYVSWFAY

SEQ ID NO: 1594 - protein, 125 aa, synthetic construct; identical to SEQ ID NO: 724
  REGION 1..125: note = Synthetic

SEQ ID NO: 1595 - DNA, 375 bp, synthetic construct; identical to SEQ ID NO: 725
  misc_feature 1..375: note = Synthetic
  source 1..375: mol_type = other DNA

SEQ ID NO: 1596 - protein, 9 aa, synthetic construct
  REGION 1..9: note = Synthetic
TGAVTTSNY

SEQ ID NO: 1597 - skipped

SEQ ID NO: 1598 - protein, 9 aa, synthetic construct
  REGION 1..9: note = Synthetic
AAWHDNAWV

SEQ ID NO: 1599 - protein, 110 aa, synthetic construct; identical to SEQ ID NO: 1439
  REGION 1..110: note = Synthetic

SEQ ID NO: 1600 - DNA, 330 bp, synthetic construct; identical to SEQ ID NO: 1440
  misc_feature 1..330: note = Synthetic
  source 1..330: mol_type = other DNA

SEQ ID NO: 1601 - protein, 8 aa, synthetic construct
  REGION 1..8: note = Synthetic
GFGFNAYA

SEQ ID NO: 1602 - protein, 10 aa, synthetic construct
  REGION 1..10: note = Synthetic
IRSKYNNYAT

SEQ ID NO: 1603 - protein, 16 aa, synthetic construct
  REGION 1..16: note = Synthetic
VRHGNFGNSYVSWFAY

SEQ ID NO: 1604 - protein, 125 aa, synthetic construct; identical to SEQ ID NO: 674
  REGION 1..125: note = Synthetic

SEQ ID NO: 1605 - DNA, 375 bp, synthetic construct; identical to SEQ ID NO: 675
  misc_feature 1..375: note = Synthetic
  source 1..375: mol_type = other DNA

SEQ ID NO: 1606 - protein, 9 aa, synthetic construct
  REGION 1..9: note = Synthetic
TGAVTTSNY

SEQ ID NO: 1607 - skipped

SEQ ID NO: 1608 - protein, 9 aa, synthetic construct
  REGION 1..9: note = Synthetic
VIWHGSVWV

SEQ ID NO: 1609 - protein, 110 aa, synthetic construct; identical to SEQ ID NO: 1299
  REGION 1..110: note = Synthetic

SEQ ID NO: 1610 - DNA, 330 bp, synthetic construct; identical to SEQ ID NO: 1300
  misc_feature 1..330: note = Synthetic
  source 1..330: mol_type = other DNA

SEQ ID NO: 1611 - protein, 8 aa, synthetic construct
  REGION 1..8: note = Synthetic
GFGFNAYA

SEQ ID NO: 1612 - protein, 10 aa, synthetic construct
  REGION 1..10: note = Synthetic
IRSKYNNYAT

SEQ ID NO: 1613 - protein, 16 aa, synthetic construct
  REGION 1..16: note = Synthetic
VRHGNFGNSYVSWFAY

SEQ ID NO: 1614 - protein, 125 aa, synthetic construct; identical to SEQ ID NO: 674
  REGION 1..125: note = Synthetic

SEQ ID NO: 1615 - DNA, 375 bp, synthetic construct; identical to SEQ ID NO: 675
  misc_feature 1..375: note = Synthetic
  source 1..375: mol_type = other DNA

SEQ ID NO: 1616 - protein, 9 aa, synthetic construct
  REGION 1..9: note = Synthetic
TGAVTTSNY

SEQ ID NO: 1617 - skipped

SEQ ID NO: 1618 - protein, 9 aa, synthetic construct
  REGION 1..9: note = Synthetic
VIWHNLAWV

SEQ ID NO: 1619 - protein, 110 aa, synthetic construct; identical to SEQ ID NO: 1339
  REGION 1..110: note = Synthetic

SEQ ID NO: 1620 - DNA, 330 bp, synthetic construct; identical to SEQ ID NO: 1340
  misc_feature 1..330: note = Synthetic
  source 1..330: mol_type = other DNA

SEQ ID NO: 1621 - protein, 8 aa, synthetic construct
  REGION 1..8: note = Synthetic
GFGFNAYA

SEQ ID NO: 1622 - protein, 10 aa, synthetic construct
  REGION 1..10: note = Synthetic
IRSKYNNYAT

SEQ ID NO: 1623 - protein, 16 aa, synthetic construct
  REGION 1..16: note = Synthetic
VRHGNFGNSYVSWFAY

SEQ ID NO: 1624 - protein, 125 aa, synthetic construct; identical to SEQ ID NO: 674
  REGION 1..125: note = Synthetic

SEQ ID NO: 1625 - DNA, 375 bp, synthetic construct; identical to SEQ ID NO: 675
  misc_feature 1..375: note = Synthetic
  source 1..375: mol_type = other DNA

SEQ ID NO: 1626 - protein, 9 aa, synthetic construct
  REGION 1..9: note = Synthetic
TGAVTTSNY

SEQ ID NO: 1627 - skipped

SEQ ID NO: 1628 - protein, 9 aa, synthetic construct
  REGION 1..9: note = Synthetic
VIWHSGAWV

SEQ ID NO: 1629 - protein, 110 aa, synthetic construct; identical to SEQ ID NO: 1259
  REGION 1..110: note = Synthetic

SEQ ID NO: 1630 - DNA, 330 bp, synthetic construct; identical to SEQ ID NO: 1260
  misc_feature 1..330: note = Synthetic
  source 1..330: mol_type = other DNA

SEQ ID NO: 1631 - protein, 8 aa, synthetic construct
  REGION 1..8: note = Synthetic
GFSFVTYA

SEQ ID NO: 1632 - protein, 10 aa, synthetic construct
  REGION 1..10: note = Synthetic
IRSKYNNYAT

SEQ ID NO: 1633 - protein, 16 aa, synthetic construct
  REGION 1..16: note = Synthetic
VRHGNFGNSYVSWFAY

SEQ ID NO: 1634 - protein, 125 aa, synthetic construct; identical to SEQ ID NO: 754
  REGION 1..125: note = Synthetic

SEQ ID NO: 1635 - DNA, 375 bp, synthetic construct; identical to SEQ ID NO: 755
  misc_feature 1..375: note = Synthetic
  source 1..375: mol_type = other DNA

SEQ ID NO: 1636 - protein, 9 aa, synthetic construct
  REGION 1..9: note = Synthetic
TGAVPTSNY

SEQ ID NO: 1637 - skipped

SEQ ID NO: 1638 - protein, 9 aa, synthetic construct
  REGION 1..9: note = Synthetic
ALWYSNLWV

SEQ ID NO: 1639 - protein, 110 aa, synthetic construct; identical to SEQ ID NO: 1119
  REGION 1..110: note = Synthetic

SEQ ID NO: 1640 - DNA, 330 bp, synthetic construct; identical to SEQ ID NO: 1120
  misc_feature 1..330: note = Synthetic
  source 1..330: mol_type = other DNA

SEQ ID NO: 1641 - protein, 8 aa, synthetic construct
  REGION 1..8: note = Synthetic
GFSFVTYA

SEQ ID NO: 1642 - protein, 10 aa, synthetic construct
  REGION 1..10: note = Synthetic
IRSKYNNYAT

SEQ ID NO: 1643 - protein, 16 aa, synthetic construct
  REGION 1..16: note = Synthetic
VRHGNFGNSYVSWFAY

SEQ ID NO: 1644 - protein, 125 aa, synthetic construct; identical to SEQ ID NO: 754
  REGION 1..125: note = Synthetic

SEQ ID NO: 1645 - DNA, 375 bp, synthetic construct; identical to SEQ ID NO: 755
  misc_feature 1..375: note = Synthetic
  source 1..375: mol_type = other DNA

SEQ ID NO: 1646 - protein, 9 aa, synthetic construct
  REGION 1..9: note = Synthetic
TGAVTTSNY

SEQ ID NO: 1647 - skipped

SEQ ID NO: 1648 - protein, 9 aa, synthetic construct
  REGION 1..9: note = Synthetic
ALWYSNLWV

SEQ ID NO: 1649 - protein, 110 aa, synthetic construct; identical to SEQ ID NO: 1179
  REGION 1..110: note = Synthetic

SEQ ID NO: 1650 - DNA, 330 bp, synthetic construct; identical to SEQ ID NO: 1180
  misc_feature 1..330: note = Synthetic
  source 1..330: mol_type = other DNA

SEQ ID NO: 1651 - protein, 8 aa, synthetic construct
  REGION 1..8: note = Synthetic
GFTFETYA

SEQ ID NO: 1652 - protein, 10 aa, synthetic construct
  REGION 1..10: note = Synthetic
IRSKYNNYAT

SEQ ID NO: 1653 - protein, 16 aa, synthetic construct
  REGION 1..16: note = Synthetic
VRHGNFGNSYVSWFAY

SEQ ID NO: 1654 - protein, 125 aa, synthetic construct; identical to SEQ ID NO: 744
  REGION 1..125: note = Synthetic

SEQ ID NO: 1655 - DNA, 375 bp, synthetic construct; identical to SEQ ID NO: 745
  misc_feature 1..375: note = Synthetic
  source 1..375: mol_type = other DNA

SEQ ID NO: 1656 - protein, 9 aa, synthetic construct
  REGION 1..9: note = Synthetic
TGAVTTSNY

SEQ ID NO: 1657 - skipped

SEQ ID NO: 1658 - protein, 9 aa, synthetic construct
  REGION 1..9: note = Synthetic
VIWHSGAWV

SEQ ID NO: 1659 - protein, 110 aa, synthetic construct; identical to SEQ ID NO: 1259
  REGION 1..110: note = Synthetic

SEQ ID NO: 1660 - DNA, 330 bp, synthetic construct; identical to SEQ ID NO: 1260
  misc_feature 1..330: note = Synthetic
  source 1..330: mol_type = other DNA

SEQ ID NO: 1661 - protein, 8 aa, synthetic construct
  REGION 1..8: note = Synthetic
GFTFETYA

SEQ ID NO: 1662 - protein, 10 aa, synthetic construct
  REGION 1..10: note = Synthetic
IRSKYTNYAT

SEQ ID NO: 1663 - protein, 16 aa, synthetic construct
  REGION 1..16: note = Synthetic
VRHGNFGNSYVSWFAY

SEQ ID NO: 1664 - protein, 125 aa, synthetic construct
  REGION 1..125: note = Synthetic
EVQLVESGGGLVQPGGSLRLSCAASGFTFETYAMNWVRQAPGKGLEWVGRIRSKYTNYATYYADSVKGRFTISRDDSKNTLYLQMNSLRAEDTAVYYCVRHGNFGNSYVSWFAYWGQGTLVTVSS

SEQ ID NO: 1665 - DNA, 375 bp, synthetic construct
  misc_feature 1..375: note = Synthetic
  source 1..375: mol_type = other DNA
gaagttcaattagttgaatctggtggtggtttagttcaacctggtggttctttacgtttatcttgtgctgcttctggttttacttttgaaacttatgctatgaattgggttcgtcaagctcctggtaaaggtttagaatgggttggtcgtattcgttctaaatatactaattatgctacttattatgctgattctgttaaaggtcgttttactatttctcgtgatgattctaaaaatactttatatttacaaatgaattctttacgtgctgaagatactgctgtttattattgtgttcgtcatggtaattttggtaattcttatgtttcttggtttgcttattggggtcaaggtactttagttactgtttcttct

SEQ ID NO: 1666 - protein, 9 aa, synthetic construct
  REGION 1..9: note = Synthetic
TGAVTTSTY

SEQ ID NO: 1667 - skipped

SEQ ID NO: 1668 - protein, 9 aa, synthetic construct
  REGION 1..9: note = Synthetic
ALWYSNLWV

SEQ ID NO: 1669 - protein, 110 aa, synthetic construct; identical to SEQ ID NO: 1099
  REGION 1..110: note = Synthetic

SEQ ID NO: 1670 - DNA, 330 bp, synthetic construct; identical to SEQ ID NO: 1100
  misc_feature 1..330: note = Synthetic
  source 1..330: mol_type = other DNA

SEQ ID NO: 1671 - protein, 8 aa, synthetic construct
  REGION 1..8: note = Synthetic
GFTFNTYA

SEQ ID NO: 1672 - protein, 10 aa, synthetic construct
  REGION 1..10: note = Synthetic
IKTKHDNYAT

SEQ ID NO: 1673 - protein, 16 aa, synthetic construct
  REGION 1..16: note = Synthetic
VRHGNFGNSYVSWFAY

SEQ ID NO: 1674 - protein, 125 aa, synthetic construct; identical to SEQ ID NO: 854
  REGION 1..125: note = Synthetic

SEQ ID NO: 1675 - DNA, 375 bp, synthetic construct; identical to SEQ ID NO: 855
  misc_feature 1..375: note = Synthetic
  source 1..375: mol_type = other DNA

SEQ ID NO: 1676 - protein, 9 aa, synthetic construct
  REGION 1..9: note = Synthetic
TGAVTTSNY

SEQ ID NO: 1677 - skipped

SEQ ID NO: 1678 - protein, 9 aa, synthetic construct
  REGION 1..9: note = Synthetic
AAWHDNAWV

SEQ ID NO: 1679 - protein, 110 aa, synthetic construct; identical to SEQ ID NO: 1439
  REGION 1..110: note = Synthetic

SEQ ID NO: 1680 - DNA, 330 bp, synthetic construct; identical to SEQ ID NO: 1440
  misc_feature 1..330: note = Synthetic
  source 1..330: mol_type = other DNA

SEQ ID NO: 1681 - protein, 8 aa, synthetic construct
  REGION 1..8: note = Synthetic
GFTFNTYA

SEQ ID NO: 1682 - protein, 10 aa, synthetic construct
  REGION 1..10: note = Synthetic
IKTKHDNYAT

SEQ ID NO: 1683 - protein, 16 aa, synthetic construct
  REGION 1..16: note = Synthetic
VRHGNFGNSYVSWFAY

SEQ ID NO: 1684 - protein, 125 aa, synthetic construct; identical to SEQ ID NO: 854
  REGION 1..125: note = Synthetic

SEQ ID NO: 1685 - DNA, 375 bp, synthetic construct; identical to SEQ ID NO: 855
  misc_feature 1..375: note = Synthetic
  source 1..375: mol_type = other DNA

SEQ ID NO: 1686 - protein, 9 aa, synthetic construct
  REGION 1..9: note = Synthetic
TGAVTTSNY

SEQ ID NO: 1687 - skipped

SEQ ID NO: 1688 - protein, 9 aa, synthetic construct
  REGION 1..9: note = Synthetic
LIWQTSAWV

SEQ ID NO: 1689 - protein, 110 aa, synthetic construct; identical to SEQ ID NO: 1499
  REGION 1..110: note = Synthetic

SEQ ID NO: 1690 - DNA, 330 bp, synthetic construct; identical to SEQ ID NO: 1500
  misc_feature 1..330: note = Synthetic
  source 1..330: mol_type = other DNA

SEQ ID NO: 1691 - protein, 8 aa, synthetic construct
  REGION 1..8: note = Synthetic
GFTFNTYA

SEQ ID NO: 1692 - protein, 10 aa, synthetic construct
  REGION 1..10: note = Synthetic
IRSKHNNYET

SEQ ID NO: 1693 - protein, 16 aa, synthetic construct
  REGION 1..16: note = Synthetic
VRHGNFGNSYVSWFAY

SEQ ID NO: 1694 - protein, 125 aa, synthetic construct; identical to SEQ ID NO: 884
  REGION 1..125: note = Synthetic

SEQ ID NO: 1695 - DNA, 375 bp, synthetic construct; identical to SEQ ID NO: 885
  misc_feature 1..375: note = Synthetic
  source 1..375: mol_type = other DNA

SEQ ID NO: 1696 - protein, 9 aa, synthetic construct
  REGION 1..9: note = Synthetic
TGAVSTNYY

SEQ ID NO: 1697 - skipped

SEQ ID NO: 1698 - protein, 9 aa, synthetic construct
  REGION 1..9: note = Synthetic
ALWYSNLWV

SEQ ID NO: 1699 - protein, 110 aa, synthetic construct; identical to SEQ ID NO: 1109
  REGION 1..110: note = Synthetic

SEQ ID NO: 1700 - DNA, 330 bp, synthetic construct; identical to SEQ ID NO: 1110
  misc_feature 1..330: note = Synthetic
  source 1..330: mol_type = other DNA

SEQ ID NO: 1701 - protein, 8 aa, synthetic construct
  REGION 1..8: note = Synthetic
GFTFNTYA

SEQ ID NO: 1702 - protein, 10 aa, synthetic construct
  REGION 1..10: note = Synthetic
IRSKHNNYET

SEQ ID NO: 1703 - protein, 16 aa, synthetic construct
  REGION 1..16: note = Synthetic
VRHGNFGNSYVSWFAY

SEQ ID NO: 1704 - protein, 125 aa, synthetic construct; identical to SEQ ID NO: 884
  REGION 1..125: note = Synthetic

SEQ ID NO: 1705 - DNA, 375 bp, synthetic construct; identical to SEQ ID NO: 885
  misc_feature 1..375: note = Synthetic
  source 1..375: mol_type = other DNA

SEQ ID NO: 1706 - protein, 9 aa, synthetic construct
  REGION 1..9: note = Synthetic
TGAVTTSTY

SEQ ID NO: 1707 - skipped

SEQ ID NO: 1708 - protein, 9 aa, synthetic construct
  REGION 1..9: note = Synthetic
ALWYSNLWV

SEQ ID NO: 1709 - protein, 110 aa, synthetic construct; identical to SEQ ID NO: 1099
  REGION 1..110: note = Synthetic

SEQ ID NO: 1710 - DNA, 330 bp, synthetic construct; identical to SEQ ID NO: 1100
  misc_feature 1..330: note = Synthetic
  source 1..330: mol_type = other DNA

SEQ ID NO: 1711 - protein, 8 aa, synthetic construct
  REGION 1..8: note = Synthetic
GFTFNTYA

SEQ ID NO: 1712 - protein, 10 aa, synthetic construct
  REGION 1..10: note = Synthetic
IRSKNFNYAT

SEQ ID NO: 1713 - protein, 16 aa, synthetic construct
  REGION 1..16: note = Synthetic
VRHGNFGNSYVSWFAY

SEQ ID NO: 1714 - protein, 125 aa, synthetic construct; identical to SEQ ID NO: 864
  REGION 1..125: note = Synthetic

SEQ ID NO: 1715 - DNA, 375 bp, synthetic construct; identical to SEQ ID NO: 865
  misc_feature 1..375: note = Synthetic
  source 1..375: mol_type = other DNA

SEQ ID NO: 1716 - protein, 9 aa, synthetic construct
  REGION 1..9: note = Synthetic
TGAVTTSNY

SEQ ID NO: 1717 - skipped

SEQ ID NO: 1718 - protein, 9 aa, synthetic construct
  REGION 1..9: note = Synthetic
VIWHNLAWV

SEQ ID NO: 1719 - protein, 110 aa, synthetic construct; identical to SEQ ID NO: 1339
  REGION 1..110: note = Synthetic

SEQ ID NO: 1720 - DNA, 330 bp, synthetic construct; identical to SEQ ID NO: 1340
  misc_feature 1..330: note = Synthetic
  source 1..330: mol_type = other DNA

SEQ ID NO: 1721 - protein, 8 aa, synthetic construct
  REGION 1..8: note = Synthetic
GFTFNTYA

SEQ ID NO: 1722 - protein, 10 aa, synthetic construct
  REGION 1..10: note = Synthetic
IRSKNFNYAT

SEQ ID NO: 1723 - protein, 16 aa, synthetic construct
  REGION 1..16: note = Synthetic
VRHGNFGNSYVSWFAY

SEQ ID NO: 1724 - protein, 125 aa, synthetic construct; identical to SEQ ID NO: 864
  REGION 1..125: note = Synthetic

SEQ ID NO: 1725 - DNA, 375 bp, synthetic construct; identical to SEQ ID NO: 865
  misc_feature 1..375: note = Synthetic
  source 1..375: mol_type = other DNA

SEQ ID NO: 1726 - protein, 9 aa, synthetic construct
  REGION 1..9: note = Synthetic
TGAVTTSTY

SEQ ID NO: 1727 - skipped

SEQ ID NO: 1728 - protein, 9 aa, synthetic construct
  REGION 1..9: note = Synthetic
ALWYSNLWV

SEQ ID NO: 1729 - protein, 110 aa, synthetic construct; identical to SEQ ID NO: 1099
  REGION 1..110: note = Synthetic

SEQ ID NO: 1730 - DNA, 330 bp, synthetic construct; identical to SEQ ID NO: 1100
  misc_feature 1..330: note = Synthetic
  source 1..330: mol_type = other DNA

SEQ ID NO: 1731 - protein, 8 aa, synthetic construct
  REGION 1..8: note = Synthetic
GFTFNTYA

SEQ ID NO: 1732 - protein, 10 aa, synthetic construct
  REGION 1..10: note = Synthetic
IRSKPNEYAT

SEQ ID NO: 1733 - protein, 16 aa, synthetic construct
  REGION 1..16: note = Synthetic
VRHGNFGNSYVSWFAY

SEQ ID NO: 1734 - protein, 125 aa, synthetic construct; identical to SEQ ID NO: 934
  REGION 1..125: note = Synthetic

SEQ ID NO: 1735 - DNA, 375 bp, synthetic construct; identical to SEQ ID NO: 935
  misc_feature 1..375: note = Synthetic
  source 1..375: mol_type = other DNA

SEQ ID NO: 1736 - protein, 9 aa, synthetic construct
  REGION 1..9: note = Synthetic
TGAVPTSNY

SEQ ID NO: 1737 - skipped

SEQ ID NO: 1738 - protein, 9 aa, synthetic construct
  REGION 1..9: note = Synthetic
ALWYSNLWV

SEQ ID NO: 1739 - protein, 110 aa, synthetic construct; identical to SEQ ID NO: 1119
  REGION 1..110: note = Synthetic

SEQ ID NO: 1740 - DNA, 330 bp, synthetic construct; identical to SEQ ID NO: 1120
  misc_feature 1..330: note = Synthetic
  source 1..330: mol_type = other DNA

SEQ ID NO: 1741 - protein, 8 aa, synthetic construct
  REGION 1..8: note = Synthetic
GFTFNTYA

SEQ ID NO: 1742 - protein, 10 aa, synthetic construct
  REGION 1..10: note = Synthetic
IRSKRSNYAT

SEQ ID NO: 1743 - protein, 16 aa, synthetic construct
  REGION 1..16: note = Synthetic
VRHGNFGNSYVSWFAY

SEQ ID NO: 1744 - protein, 125 aa, synthetic construct; identical to SEQ ID NO: 824
  REGION 1..125: note = Synthetic

SEQ ID NO: 1745 - DNA, 375 bp, synthetic construct; identical to SEQ ID NO: 825
  misc_feature 1..375: note = Synthetic
  source 1..375: mol_type = other DNA

SEQ ID NO: 1746 - protein, 9 aa, synthetic construct
  REGION 1..9: note = Synthetic
TGAVPTSNY

SEQ ID NO: 1747 - skipped

SEQ ID NO: 1748 - protein, 9 aa, synthetic construct
  REGION 1..9: note = Synthetic
ALWYSNLWV

SEQ ID NO: 1749 - protein, 110 aa, synthetic construct; identical to SEQ ID NO: 1119
  REGION 1..110: note = Synthetic

SEQ ID NO: 1750 - DNA, 330 bp, synthetic construct; identical to SEQ ID NO: 1120
  misc_feature 1..330: note = Synthetic
  source 1..330: mol_type = other DNA

SEQ ID NO: 1751 - protein, 8 aa, synthetic construct
  REGION 1..8: note = Synthetic
GFTFNTYA

SEQ ID NO: 1752 - protein, 10 aa, synthetic construct
  REGION 1..10: note = Synthetic
IRSKRSNYAT

SEQ ID NO: 1753 - protein, 16 aa, synthetic construct
  REGION 1..16: note = Synthetic
VRHGNFGNSYVSWFAY

SEQ ID NO: 1754 - protein, 125 aa, synthetic construct; identical to SEQ ID NO: 824
  REGION 1..125: note = Synthetic

SEQ ID NO: 1755 - DNA, 375 bp, synthetic construct; identical to SEQ ID NO: 825
  misc_feature 1..375: note = Synthetic
  source 1..375: mol_type = other DNA

SEQ ID NO: 1756 - protein, 9 aa, synthetic construct
  REGION 1..9: note = Synthetic
TGAVTTSNY

SEQ ID NO: 1757 - skipped

SEQ ID NO: 1758 - protein, 9 aa, synthetic construct
  REGION 1..9: note = Synthetic
AAWHDNAWV

SEQ ID NO: 1759 - protein, 110 aa, synthetic construct; identical to SEQ ID NO: 1439
  REGION 1..110: note = Synthetic

SEQ ID NO: 1760 - DNA, 330 bp, synthetic construct; identical to SEQ ID NO: 1440
  misc_feature 1..330: note = Synthetic
  source 1..330: mol_type = other DNA

SEQ ID NO: 1761 - protein, 8 aa, synthetic construct
  REGION 1..8: note = Synthetic
GFTFNTYA

SEQ ID NO: 1762 - protein, 10 aa, synthetic construct
  REGION 1..10: note = Synthetic
IRSKVNNYAT

SEQ ID NO: 1763 - protein, 16 aa, synthetic construct
  REGION 1..16: note = Synthetic
VRHGNFGNSYVSWFAY

SEQ ID NO: 1764 - protein, 125 aa, synthetic construct; identical to SEQ ID NO: 984
  REGION 1..125: note = Synthetic

SEQ ID NO: 1765 - DNA, 375 bp, synthetic construct; identical to SEQ ID NO: 985
  misc_feature 1..375: note = Synthetic
  source 1..375: mol_type = other DNA

SEQ ID NO: 1766 - protein, 9 aa, synthetic construct
  REGION 1..9: note = Synthetic
TGAVPTSNY

SEQ ID NO: 1767 - skipped

SEQ ID NO: 1768 - protein, 9 aa, synthetic construct
  REGION 1..9: note = Synthetic
ALWYSNLWV

SEQ ID NO: 1769 - protein, 110 aa, synthetic construct; identical to SEQ ID NO: 1119
  REGION 1..110: note = Synthetic

SEQ ID NO: 1770 - DNA, 330 bp, synthetic construct; identical to SEQ ID NO: 1120
  misc_feature 1..330: note = Synthetic
  source 1..330: mol_type = other DNA

SEQ ID NO: 1771 - protein, 8 aa, synthetic construct
  REGION 1..8: note = Synthetic
GFTFNTYA

SEQ ID NO: 1772 - protein, 10 aa, synthetic construct
  REGION 1..10: note = Synthetic
IRSKVNNYAT

SEQ ID NO: 1773 - protein, 16 aa, synthetic construct
  REGION 1..16: note = Synthetic
VRHGNFGNSYVSWFAY

SEQ ID NO: 1774 - protein, 125 aa, synthetic construct; identical to SEQ ID NO: 984
  REGION 1..125: note = Synthetic

SEQ ID NO: 1775 - DNA, 375 bp, synthetic construct; identical to SEQ ID NO: 985
  misc_feature 1..375: note = Synthetic
  source 1..375: mol_type = other DNA

SEQ ID NO: 1776 - protein, 9 aa, synthetic construct
  REGION 1..9: note = Synthetic
TGAVTPSNY

SEQ ID NO: 1777 - skipped

SEQ ID NO: 1778 - protein, 9 aa, synthetic construct
  REGION 1..9: note = Synthetic
ALWYSNLWV

SEQ ID NO: 1779 - protein, 110 aa, synthetic construct; identical to SEQ ID NO: 1139
  REGION 1..110: note = Synthetic

SEQ ID NO: 1780 - DNA, 330 bp, synthetic construct; identical to SEQ ID NO: 1140
  misc_feature 1..330: note = Synthetic
  source 1..330: mol_type = other DNA

SEQ ID NO: 1781 - protein, 8 aa, synthetic construct
  REGION 1..8: note = Synthetic
GFTFNTYA

SEQ ID NO: 1782 - protein, 10 aa, synthetic construct
  REGION 1..10: note = Synthetic
IRSKYNKYAT

SEQ ID NO: 1783 - protein, 16 aa, synthetic construct
  REGION 1..16: note = Synthetic
VRHGNFGNSYVSWFAY

SEQ ID NO: 1784 - protein, 125 aa, synthetic construct; identical to SEQ ID NO: 1004
  REGION 1..125: note = Synthetic

SEQ ID NO: 1785 - DNA, 375 bp, synthetic construct; identical to SEQ ID NO: 1005
  misc_feature 1..375: note = Synthetic
  source 1..375: mol_type = other DNA

SEQ ID NO: 1786 - protein, 9 aa, synthetic construct
  REGION 1..9: note = Synthetic
TGAVTTSNY

SEQ ID NO: 1787 - skipped

SEQ ID NO: 1788 - protein, 9 aa, synthetic construct
  REGION 1..9: note = Synthetic
VIWHNLAWV

SEQ ID NO: 1789 - protein, 110 aa, synthetic construct; identical to SEQ ID NO: 1339
  REGION 1..110: note = Synthetic

SEQ ID NO: 1790 - DNA, 330 bp, synthetic construct; identical to SEQ ID NO: 1340
  misc_feature 1..330: note = Synthetic
  source 1..330: mol_type = other DNA

SEQ ID NO: 1791 - protein, 8 aa, synthetic construct
  REGION 1..8: note = Synthetic
GFTFNTYA

SEQ ID NO: 1792 - protein, 10 aa, synthetic construct
  REGION 1..10: note = Synthetic
IRSKYNKYAT

SEQ ID NO: 1793 - protein, 16 aa, synthetic construct
  REGION 1..16: note = Synthetic
VRHGNFGNSYVSWFAY

SEQ ID NO: 1794 - protein, 125 aa, synthetic construct; identical to SEQ ID NO: 1004
  REGION 1..125: note = Synthetic

SEQ ID NO: 1795 - DNA, 375 bp, synthetic construct; identical to SEQ ID NO: 1005
  misc_feature 1..375: note = Synthetic
  source 1..375: mol_type = other DNA

SEQ ID NO: 1796 - protein, 9 aa, synthetic construct
  REGION 1..9: note = Synthetic
TGAVTTSTY

SEQ ID NO: 1797 - skipped

SEQ ID NO: 1798 - protein, 9 aa, synthetic construct
  REGION 1..9: note = Synthetic
ALWYSNLWV

SEQ ID NO: 1799 - protein, 110 aa, synthetic construct; identical to SEQ ID NO: 1099
  REGION 1..110: note = Synthetic

SEQ ID NO: 1800 - DNA, 330 bp, synthetic construct; identical to SEQ ID NO: 1100
  misc_feature 1..330: note = Synthetic
  source 1..330: mol_type = other DNA

SEQ ID NO: 1801 - protein, 8 aa, synthetic construct
  REGION 1..8: note = Synthetic
GFTFNTYA

SEQ ID NO: 1802 - protein, 10 aa, synthetic construct
  REGION 1..10: note = Synthetic
IRSKYNNYAT

SEQ ID NO: 1803 - protein, 16 aa, synthetic construct
  REGION 1..16: note = Synthetic
ARHGEYSSGWPYYFAY

SEQ ID NO: 1804 - protein, 125 aa, synthetic construct; identical to SEQ ID NO: 1054
  REGION 1..125: note = Synthetic

SEQ ID NO: 1805 - DNA, 375 bp, synthetic construct; identical to SEQ ID NO: 1055
  misc_feature 1..375: note = Synthetic
  source 1..375: mol_type = other DNA

SEQ ID NO: 1806 - protein, 9 aa, synthetic construct
  REGION 1..9: note = Synthetic
TGAVTTSNY

SEQ ID NO: 1807 - skipped

SEQ ID NO: 1808 - protein, 9 aa, synthetic construct
  REGION 1..9: note = Synthetic
LIWYGSAWV

SEQ ID NO: 1809 - protein, 110 aa, synthetic construct; identical to SEQ ID NO: 1419
  REGION 1..110: note = Synthetic

SEQ ID NO: 1810 - DNA, 330 bp, synthetic construct; identical to SEQ ID NO: 1420
  misc_feature 1..330: note = Synthetic
  source 1..330: mol_type = other DNA

SEQ ID NO: 1811 - protein, 8 aa, synthetic construct
  REGION 1..8: note = Synthetic
GFTFNTYA

SEQ ID NO: 1812 - protein, 10 aa, synthetic construct
  REGION 1..10: note = Synthetic
IRSKYNNYAT

SEQ ID NO: 1813 - protein, 16 aa, synthetic construct
  REGION 1..16: note = Synthetic
VREGIGGTSYRGNFAY

SEQ ID NO: 1814 - protein, 125 aa, synthetic construct; identical to SEQ ID NO: 1074
  REGION 1..125: note = Synthetic

SEQ ID NO: 1815 - DNA, 375 bp, synthetic construct; identical to SEQ ID NO: 1075
  misc_feature 1..375: note = Synthetic
  source 1..375: mol_type = other DNA

SEQ ID NO: 1816 - protein, 9 aa, synthetic construct
  REGION 1..9: note = Synthetic
TGAVPTSNY

SEQ ID NO: 1817 - skipped

SEQ ID NO: 1818 - protein, 9 aa, synthetic construct
  REGION 1..9: note = Synthetic
ALWYSNLWV

SEQ ID NO: 1819 - protein, 110 aa, synthetic construct; identical to SEQ ID NO: 1119
  REGION 1..110: note = Synthetic

SEQ ID NO: 1820 - DNA, 330 bp, synthetic construct; identical to SEQ ID NO: 1120
  misc_feature 1..330: note = Synthetic
  source 1..330: mol_type = other DNA

SEQ ID NO: 1821 - protein, 8 aa, synthetic construct
  REGION 1..8: note = Synthetic
GFTFNTYA

SEQ ID NO: 1822 - protein, 10 aa, synthetic construct
  REGION 1..10: note = Synthetic
IRSKYNNYAT

SEQ ID NO: 1823 - protein, 16 aa, synthetic construct
  REGION 1..16: note = Synthetic
VREGIGGTSYRGNFAY

SEQ ID NO: 1824 - protein, 125 aa, synthetic construct; identical to SEQ ID NO: 1074
  REGION 1..125: note = Synthetic

SEQ ID NO: 1825 - DNA, 375 bp, synthetic construct; identical to SEQ ID NO: 1075
  misc_feature 1..375: note = Synthetic
  source 1..375: mol_type = other DNA

SEQ ID NO: 1826 - protein, 9 aa, synthetic construct
  REGION 1..9: note = Synthetic
TGAVTTSNY

SEQ ID NO: 1827 - skipped

SEQ ID NO: 1828 - protein, 9 aa, synthetic construct
  REGION 1..9: note = Synthetic
LIWYNNIWV

SEQ ID NO: 1829 - protein, 110 aa, synthetic construct; identical to SEQ ID NO: 1399
  REGION 1..110: note = Synthetic

SEQ ID NO: 1830 - DNA, 330 bp, synthetic construct; identical to SEQ ID NO: 1400
  misc_feature 1..330: note = Synthetic
  source 1..330: mol_type = other DNA

SEQ ID NO: 1831 - protein, 8 aa, synthetic construct
  REGION 1..8: note = Synthetic
GFTFNTYA

SEQ ID NO: 1832 - protein, 10 aa, synthetic construct
  REGION 1..10: note = Synthetic
IRSKYNNYAT

SEQ ID NO: 1833 - protein, 16 aa, synthetic construct
  REGION 1..16: note = Synthetic
VRHGNFGNVGTSYFAY

SEQ ID NO: 1834 - protein, 125 aa, synthetic construct; identical to SEQ ID NO: 1064
  REGION 1..125: note = Synthetic

SEQ ID NO: 1835 - DNA, 375 bp, synthetic construct; identical to SEQ ID NO: 1065
  misc_feature 1..375: note = Synthetic
  source 1..375: mol_type = other DNA

SEQ ID NO: 1836 - protein, 9 aa, synthetic construct
  REGION 1..9: note = Synthetic
TGAVTPSNY

SEQ ID NO: 1837 - skipped

SEQ ID NO: 1838 - protein, 9 aa, synthetic construct
  REGION 1..9: note = Synthetic
ALWYSNLWV

SEQ ID NO: 1839 - protein, 110 aa, synthetic construct; identical to SEQ ID NO: 1139
  REGION 1..110: note = Synthetic

SEQ ID NO: 1840 - DNA, 330 bp, synthetic construct; identical to SEQ ID NO: 1140
  misc_feature 1..330: note = Synthetic
  source 1..330: mol_type = other DNA

SEQ ID NO: 1841 - protein, 8 aa, synthetic construct
  REGION 1..8: note = Synthetic
GFTFNTYA

SEQ ID NO: 1842 - protein, 10 aa, synthetic construct
  REGION 1..10: note = Synthetic
IRSKYNNYAT

SEQ ID NO: 1843 - protein, 16 aa, synthetic construct
  REGION 1..16: note = Synthetic
VRHGNFGNVGTSYFAY

SEQ ID NO: 1844 - protein, 125 aa, synthetic construct; identical to SEQ ID NO: 1064
  REGION 1..125: note = Synthetic

SEQ ID NO: 1845 - DNA, 375 bp, synthetic construct; identical to SEQ ID NO: 1065
  misc_feature 1..375: note = Synthetic
  source 1..375: mol_type = other DNA

SEQ ID NO: 1846 - protein, 9 aa, synthetic construct
  REGION 1..9: note = Synthetic
TGAVTTSNY

SEQ ID NO: 1847 - skipped

SEQ ID NO: 1848 - protein, 9 aa, synthetic construct
  REGION 1..9: note = Synthetic
AAWHDNAWV

SEQ ID NO: 1849 - protein, 110 aa, synthetic construct; identical to SEQ ID NO: 1439
  REGION 1..110: note = Synthetic

SEQ ID NO: 1850 - DNA, 330 bp, synthetic construct; identical to SEQ ID NO: 1440
  misc_feature 1..330: note = Synthetic
  source 1..330: mol_type = other DNA

SEQ ID NO: 1851 - protein, 8 aa, synthetic construct
  REGION 1..8: note = Synthetic
GFTFNTYA

SEQ ID NO: 1852 - protein, 10 aa, synthetic construct
  REGION 1..10: note = Synthetic
IRSKYTNYAT

SEQ ID NO: 1853 - protein, 16 aa, synthetic construct
  REGION 1..16: note = Synthetic
VRHGNFGNSYVSWFAY

SEQ ID NO: 1854 - protein, 125 aa, synthetic construct; identical to SEQ ID NO: 954
  REGION 1..125: note = Synthetic

SEQ ID NO: 1855 - DNA, 375 bp, synthetic construct; identical to SEQ ID NO: 955
  misc_feature 1..375: note = Synthetic
  source 1..375: mol_type = other DNA

SEQ ID NO: 1856 - protein, 9 aa, synthetic construct
  REGION 1..9: note = Synthetic
TGAVTTSNY

SEQ ID NO: 1857 - skipped

SEQ ID NO: 1858 - protein, 9 aa, synthetic construct
  REGION 1..9: note = Synthetic
VIWHNLAWV

SEQ ID NO: 1859 - protein, 110 aa, synthetic construct; identical to SEQ ID NO: 1339
  REGION 1..110: note = Synthetic

SEQ ID NO: 1860 - DNA, 330 bp, synthetic construct; identical to SEQ ID NO: 1340
  misc_feature 1..330: note = Synthetic
  source 1..330: mol_type = other DNA

SEQ ID NO: 1861 - protein, 8 aa, synthetic construct
  REGION 1..8: note = Synthetic
GFTFNTYA

SEQ ID NO: 1862 - protein, 10 aa, synthetic construct
  REGION 1..10: note = Synthetic
IRSQYNNYAT

SEQ ID NO: 1863 - protein, 16 aa, synthetic construct
  REGION 1..16: note = Synthetic
VRHGNFGNSYVSWFAY

SEQ ID NO: 1864 - protein, 125 aa, synthetic construct; identical to SEQ ID NO: 964
  REGION 1..125: note = Synthetic

SEQ ID NO: 1865 - DNA, 375 bp, synthetic construct; identical to SEQ ID NO: 965
  misc_feature 1..375: note = Synthetic
  source 1..375: mol_type = other DNA

SEQ ID NO: 1866 - protein, 9 aa, synthetic construct
  REGION 1..9: note = Synthetic
TGAVSTNYY

SEQ ID NO: 1867 - skipped

SEQ ID NO: 1868 - protein, 9 aa, synthetic construct
  REGION 1..9: note = Synthetic
ALWYSNLWV

SEQ ID NO: 1869 - protein, 110 aa, synthetic construct; identical to SEQ ID NO: 1109
  REGION 1..110: note = Synthetic

SEQ ID NO: 1870 - DNA, 330 bp, synthetic construct; identical to SEQ ID NO: 1110
  misc_feature 1..330: note = Synthetic
  source 1..330: mol_type = other DNA

SEQ ID NO: 1871 - protein, 8 aa, synthetic construct
  REGION 1..8: note = Synthetic
GFTFNTYA

SEQ ID NO: 1872 - protein, 10 aa, synthetic construct
  REGION 1..10: note = Synthetic
IRSSNNNYAT

SEQ ID NO: 1873 - protein, 16 aa, synthetic construct
  REGION 1..16: note = Synthetic
VRHGNFGNSYVSWFAY

SEQ ID NO: 1874 - protein, 125 aa, synthetic construct; identical to SEQ ID NO: 994
  REGION 1..125: note = Synthetic

SEQ ID NO: 1875 - DNA, 375 bp, synthetic construct; identical to SEQ ID NO: 995
  misc_feature 1..375: note = Synthetic
  source 1..375: mol_type = other DNA

SEQ ID NO: 1876 - protein, 9 aa, synthetic construct
  REGION 1..9: note = Synthetic
LGSVTTFNY

SEQ ID NO: 1877 - skipped

SEQ ID NO: 1878 - protein, 9 aa, synthetic construct
  REGION 1..9: note = Synthetic
ALWYSNLWV

SEQ ID NO: 1879 - protein, 110 aa, synthetic construct; identical to SEQ ID NO: 1169
  REGION 1..110: note = Synthetic

SEQ ID NO: 1880 - DNA, 330 bp, synthetic construct; identical to SEQ ID NO: 1170
  misc_feature 1..330: note = Synthetic
  source 1..330: mol_type = other DNA

SEQ ID NO: 1881 - protein, 8 aa, synthetic construct
  REGION 1..8: note = Synthetic
GFTFNTYA

SEQ ID NO: 1882 - protein, 10 aa, synthetic construct
  REGION 1..10: note = Synthetic
IRSSNNNYAT

SEQ ID NO: 1883 - protein, 16 aa, synthetic construct
  REGION 1..16: note = Synthetic
VRHGNFGNSYVSWFAY

SEQ ID NO: 1884 - protein, 125 aa, synthetic construct; identical to SEQ ID NO: 994
  REGION 1..125: note = Synthetic

SEQ ID NO: 1885 - DNA, 375 bp, synthetic construct; identical to SEQ ID NO: 995
  misc_feature 1..375: note = Synthetic
  source 1..375: mol_type = other DNA

SEQ ID NO: 1886 - protein, 9 aa, synthetic construct
  REGION 1..9: note = Synthetic
TGAVTTSTY

SEQ ID NO: 1887 - skipped

SEQ ID NO: 1888 - protein, 9 aa, synthetic construct
  REGION 1..9: note = Synthetic
ALWYSNLWV

SEQ ID NO: 1889 - protein, 110 aa, synthetic construct; identical to SEQ ID NO: 1099
  REGION 1..110: note = Synthetic

SEQ ID NO: 1890 - DNA, 330 bp, synthetic construct; identical to SEQ ID NO: 1100
  misc_feature 1..330: note = Synthetic
  source 1..330: mol_type = other DNA

SEQ ID NO: 1891 - protein, 8 aa, synthetic construct
  REGION 1..8: note = Synthetic
RFTFETYA

SEQ ID NO: 1892 - protein, 10 aa, synthetic construct
  REGION 1..10: note = Synthetic
IRSKYNNYAT

SEQ ID NO: 1893 - protein, 16 aa, synthetic construct
  REGION 1..16: note = Synthetic
VRHGNFGNSYVSWFAY

SEQ ID NO: 1894 - protein, 125 aa, synthetic construct; identical to SEQ ID NO: 684
  REGION 1..125: note = Synthetic

SEQ ID NO: 1895 - DNA, 375 bp, synthetic construct; identical to SEQ ID NO: 685
  misc_feature 1..375: note = Synthetic
  source 1..375: mol_type = other DNA

SEQ ID NO: 1896 - protein, 9 aa, synthetic construct
  REGION 1..9: note = Synthetic
TGAVSTNYY

SEQ ID NO: 1897 - skipped

SEQ ID NO: 1898 - protein, 9 aa, synthetic construct
  REGION 1..9: note = Synthetic
ALWYSNLWV

SEQ ID NO: 1899 - protein, 110 aa, synthetic construct; identical to SEQ ID NO: 1109
  REGION 1..110: note = Synthetic

SEQ ID NO: 1900 - DNA, 330 bp, synthetic construct; identical to SEQ ID NO: 1110
  misc_feature 1..330: note = Synthetic
  source 1..330: mol_type = other DNA

SEQ ID NO: 1901 - protein, 8 aa, synthetic construct
  REGION 1..8: note = Synthetic
RFTFETYA

SEQ ID NO: 1902 - protein, 10 aa, synthetic construct
  REGION 1..10: note = Synthetic
IRSKYNNYAT

SEQ ID NO: 1903 - protein, 16 aa, synthetic construct
  REGION 1..16: note = Synthetic
VRHGNFGNSYVSWFAY

SEQ ID NO: 1904 - protein, 125 aa, synthetic construct; identical to SEQ ID NO: 684
  REGION 1..125: note = Synthetic

SEQ ID NO: 1905 - DNA, 375 bp, synthetic construct; identical to SEQ ID NO: 685
  misc_feature 1..375: note = Synthetic
  source 1..375: mol_type = other DNA

SEQ ID NO: 1906 - protein, 9 aa, synthetic construct
  REGION 1..9: note = Synthetic
TGAVTTSTY

SEQ ID NO: 1907 - skipped

SEQ ID NO: 1908 - protein, 9 aa, synthetic construct
  REGION 1..9: note = Synthetic
ALWYSNLWV

SEQ ID NO: 1909 - protein, 110 aa, synthetic construct; identical to SEQ ID NO: 1099
  REGION 1..110: note = Synthetic

SEQ ID NO: 1910 - DNA, 330 bp, synthetic construct; identical to SEQ ID NO: 1100
  misc_feature 1..330: note = Synthetic
  source 1..330: mol_type = other DNA

SEQ ID NO: 1911 - protein, 9 aa, synthetic construct
  REGION 1..9: note = Synthetic
GYSISSGYS

SEQ ID NO: 1912 - protein, 7 aa, synthetic construct
  REGION 1..7: note = Synthetic
IHYSGST

SEQ ID NO: 1913 - protein, 15 aa, synthetic construct
  REGION 1..15: note = Synthetic
ARETGYYGTSYAMDY

SEQ ID NO: 1914 - protein, 122 aa, synthetic construct
  REGION 1..122: note = Synthetic
QVQLQESGPGLVKPSETLSLTCTVSGYSISSGYSWHWIRQPPGKGLEWIGYIHYSGSTNYNPSLKSRVTISVDTSKNQFSLKLSSVTAADTAVYYCARETGYYGTSYAMDYWGQGTLVTVSS

SEQ ID NO: 1915 - DNA, 366 bp, synthetic construct
  misc_feature 1..366: note = Synthetic
  source 1..366: mol_type = other DNA
caagttcaattacaagaatctggtcctggtttagttaaaccttctgaaactttatctttaacttgtactgtttctggttattctatttcttctggttattcttggcattggattcgtcaacctcctggtaaaggtttagaatggattggttatattcattattctggttctactaattataatccttctttaaaatctcgtgttactatttctgttgatacttctaaaaatcaattttctttaaaattatcttctgttactgctgctgatactgctgtttattattgtgctcgtgaaactggttattatggtacttcttatgctatggattattggggtcaaggtactttagttactgtttcttct

SEQ ID NO: 1916 - protein, 11 aa, synthetic construct
  REGION 1..11: note = Synthetic
QSLVHSNGNTY

SEQ ID NO: 1917 - skipped

SEQ ID NO: 1918 - protein, 9 aa, synthetic construct
  REGION 1..9: note = Synthetic
SQNTHVPRT

SEQ ID NO: 1919 - protein, 112 aa, synthetic construct
  REGION 1..112: note = Synthetic
DIQMTQSPSSLSASVGDRVTITCRSSQSLVHSNGNTYLHWYQQKPGQPPKLLIYKVSNRFSGVPDRFSGSGSGTDFTLTISSLQAEDVAVYYCSQNTHVPRTFGQGTKLEIK

SEQ ID NO: 1920 - DNA, 336 bp, synthetic construct
  misc_feature 1..336: note = Synthetic
  source 1..336: mol_type = other DNA
gatattcaaatgactcaatctccttcttctttatctgcttctgttggtgatcgtgttactattacttgtcgttcttctcaatctttagttcattctaatggtaatacttatttacattggtatcaacaaaaacctggtcaacctcctaaattattaatttataaagtttctaatcgtttttctggtgttcctgatcgtttttctggttctggttctggtactgattttactttaactatttcttctttacaagctgaagatgttgctgtttattattgttctcaaaatactcatgttcctcgtacttttggtcaaggtactaaattagaaattaaa

SEQ ID NO: 1921 - protein, 8 aa, synthetic construct
  REGION 1..8: note = Synthetic
GFTFSNYW

SEQ ID NO: 1922 - protein, 10 aa, synthetic construct
  REGION 1..10: note = Synthetic
IRLKSDNHAT

SEQ ID NO: 1923 - protein, 7 aa, synthetic construct
  REGION 1..7: note = Synthetic
TVPATDN

SEQ ID NO: 1924 - protein, 116 aa, synthetic construct
  REGION 1..116: note = Synthetic
EVQLEEFGGGLVQPGGSMKLSCIASGFTFSNYWMSWVRQSPEKGLEWVAEIRLKSDNHATHYAESVKGRFIISRDDSKSRLYLQMNILRAEDTGIYYCTVPATDNWGQGTSVTVSS

SEQ ID NO: 1925 - DNA, 348 bp, synthetic construct
  misc_feature 1..348: note = Synthetic
  source 1..348: mol_type = other DNA
gaagttcaattagaagaatttggtggtggtttagttcaacctggtggttctatgaaattatcttgtattgcttctggttttactttttctaattattggatgtcttgggttcgtcaatctcctgaaaaaggtttagaatgggttgctgaaattcgtttaaaatctgataatcatgctactcattatgctgaatctgttaaaggtcgttttattatttctcgtgatgattctaaatctcgtttatatttacaaatgaatattttacgtgctgaagatactggtatttattattgtactgttcctgctactgataattggggtcaaggtacttctgttactgtttcttct

SEQ ID NO: 1926 - protein, 6 aa, synthetic construct
  REGION 1..6: note = Synthetic
QNVRAA

SEQ ID NO: 1927 - skipped

SEQ ID NO: 1928 - protein, 9 aa, synthetic construct
  REGION 1..9: note = Synthetic
LQHWNYPWT

SEQ ID NO: 1929 - protein, 107 aa, synthetic construct
  REGION 1..107: note = Synthetic
DIVLTQSQKFMSTSVGDRVNITCKASQNVRAAVAWYQQKPGQSPKGLIFLASNRHTRVPDRFTGSGSGTDFTLSISNVQSEDLADYFCLQHWNYPWTFGGGTKLEIK

SEQ ID NO: 1930 - DNA, 321 bp, synthetic construct
  misc_feature 1..321: note = Synthetic
  source 1..321: mol_type = other DNA
gatattgttttaactcaatctcaaaaatttatgtctacttctgttggtgatcgtgttaatattacttgtaaagcttctcaaaatgttcgtgctgctgttgcttggtatcaacaaaaacctggtcaatctcctaaaggtttaatttttttagcttctaatcgtcatactcgtgttcctgatcgttttactggttctggttctggtactgattttactttatctatttctaatgttcaatctgaagatttagctgattatttttgtttacaacattggaattatccttggacttttggtggtggtactaaattagaaattaaa

SEQ ID NO: 1931 - protein, 8 aa, synthetic construct
  REGION 1..8: note = Synthetic
GYTLTRYW

SEQ ID NO: 1932 - protein, 8 aa, synthetic construct
  REGION 1..8: note = Synthetic
IYPGDGDT

SEQ ID NO: 1933 - protein, 10 aa, synthetic construct
  REGION 1..10: note = Synthetic
ASWGYDGFDY

SEQ ID NO: 1934 - protein, 117 aa, synthetic construct
  REGION 1..117: note = Synthetic
EVQLQQFGAELARPGASVKLSCKASGYTLTRYWMQWVKQRPGQGLEWIGAIYPGDGDTRYTQKFKDKATLTADKSSSIAYMKLSSLASEDSAVYYCASWGYDGFDYWGQGTTLTVSS

SEQ ID NO: 1935 - DNA, 351 bp, synthetic construct
  misc_feature 1..351: note = Synthetic
  source 1..351: mol_type = other DNA
gaagttcaattacaacaatttggtgctgaattagctcgtcctggtgcttctgttaaattatcttgtaaagcttctggttatactttaactcgttattggatgcaatgggttaaacaacgtcctggtcaaggtttagaatggattggtgctatttatcctggtgatggtgatactcgttatactcaaaaatttaaagataaagctactttaactgctgataaatcttcttctattgcttatatgaaattatcttctttagcttctgaagattctgctgtttattattgtgcttcttggggttatgatggttttgattattggggtcaaggtactactttaactgtttcttct

SEQ ID NO: 1936 - protein, 11 aa, synthetic construct
  REGION 1..11: note = Synthetic
KSLLHSNGNTY

SEQ ID NO: 1937 - skipped

SEQ ID NO: 1938 - protein, 9 aa, synthetic construct
  REGION 1..9: note = Synthetic
MQHLEYPFT

SEQ ID NO: 1939 - protein, 112 aa, synthetic construct
  REGION 1..112: note = Synthetic
DIVMTQAAPSVPVTPGESVSISCRSSKSLLHSNGNTYLYWFLQRPGQSPQLLIYRMSNLASGVPDRFSGSGSGTAFTLRISRVEAEDVGVYYCMQHLEYPFTFGAGTKLELK

SEQ ID NO: 1940 - DNA, 336 bp, synthetic construct
  misc_feature 1..336: note = Synthetic
  source 1..336: mol_type = other DNA
gatattgttatgactcaagctgctccttctgttcctgttactcctggtgaatctgtttctatttcttgtcgttcttctaaatctttattacattctaatggtaatacttatttatattggtttttacaacgtcctggtcaatctcctcaattattaatttatcgtatgtctaatttagcttctggtgttcctgatcgtttttctggttctggttctggtactgcttttactttacgtatttctcgtgttgaagctgaagatgttggtgtttattattgtatgcaacatttagaatatccttttacttttggtgctggtactaaattagaattaaaa

SEQ ID NO: 1941 - protein, 8 aa, synthetic construct
  REGION 1..8: note = Synthetic
GYTFTSYD

SEQ ID NO: 1942 - protein, 8 aa, synthetic construct
  REGION 1..8: note = Synthetic
IFPGDGTS

SEQ ID NO: 1943 - protein, 7 aa, synthetic construct
  REGION 1..7: note = Synthetic
ARRLGSH

SEQ ID NO: 1944 - protein, 114 aa, synthetic construct
  REGION 1..114: note = Synthetic
EVQLVQSGAEVKKPGASVKLSCKASGYTFTSYDINWVRQAPGQGLEWIGWIFPGDGTSKYAQKFQGRATLTTDKSTSTAYMELSSLRSEDTAVYYCARRLGSHWGQGTTLTVSS

SEQ ID NO: 1945 - DNA, 342 bp, synthetic construct
  misc_feature 1..342: note = Synthetic
  source 1..342: mol_type = other DNA
gaagttcaattagttcaatctggtgctgaagttaaaaaacctggtgcttctgttaaattatcttgtaaagcttctggttatacttttacttcttatgatattaattgggttcgtcaagctcctggtcaaggtttagaatggattggttggatttttcctggtgatggtacttctaaatatgctcaaaaatttcaaggtcgtgctactttaactactgataaatctacttctactgcttatatggaattatcttctttacgttctgaagatactgctgtttattattgtgctcgtcgtttaggttctcattggggtcaaggtactactttaactgtttcttct

SEQ ID NO: 1946 - protein, 8 aa, synthetic construct
  REGION 1..8: note = Synthetic
GFTFSSYA

SEQ ID NO: 1947 - protein, 8 aa, synthetic construct
  REGION 1..8: note = Synthetic
ISSGGGYT

SEQ ID NO: 1948 - protein, 10 aa, synthetic construct
  REGION 1..10: note = Synthetic
ARGFITIFDY

SEQ ID NO: 1949 - protein, 117 aa, synthetic construct; identical to SEQ ID NO: 634
  REGION 1..117: note = Synthetic

SEQ ID NO: 1950 - DNA, 351 bp, synthetic construct; identical to SEQ ID NO: 635
  misc_feature 1..351: note = Synthetic
  source 1..351: mol_type = other DNA

SEQ ID NO: 1951 - protein, 8 aa, synthetic construct
  REGION 1..8: note = Synthetic
GFNIKDTY

SEQ ID NO: 1952 - protein, 8 aa, synthetic construct
  REGION 1..8: note = Synthetic
IDPENGDT

SEQ ID NO: 1953 - protein, 12 aa, synthetic construct
  REGION 1..12: note = Synthetic
KDYGNYERYFDV

SEQ ID NO: 1954 - protein, 119 aa, synthetic construct
  REGION 1..119: note = Synthetic
EVRLQQSGAELVKPGASVKLSCTASGFNIKDTYMHWVKQRPEQGLEWIGWIDPENGDTEYAPKFQGKATMTADTSSNIAYLHLSGLTSEDTAVYYCKDYGNYERYFDVWGAGTTVTVSS

SEQ ID NO: 1955 - DNA, 357 bp, synthetic construct
  misc_feature 1..357: note = Synthetic
  source 1..357: mol_type = other DNA
gaagttcgtttacaacaatctggtgctgaattagttaaacctggtgcttctgttaaattatcttgtactgcttctggttttaatattaaagatacttatatgcattgggttaaacaacgtcctgaacaaggtttagaatggattggttggattgatcctgaaaatggtgatactgaatatgctcctaaatttcaaggtaaagctactatgactgctgatacttcttctaatattgcttatttacatttatctggtttaacttctgaagatactgctgtttattattgtaaagattatggtaattatgaacgttattttgatgtttggggtgctggtactactgttactgtttcttct

SEQ ID NO: 1956 - protein, 8 aa, synthetic construct
  REGION 1..8: note = Synthetic
GFAFSAYD

SEQ ID NO: 1957 - protein, 8 aa, synthetic construct
  REGION 1..8: note = Synthetic
INSGGSYT

SEQ ID NO: 1958 - protein, 6 aa, synthetic construct
  REGION 1..6: note = Synthetic
ARNVAY

SEQ ID NO: 1959 - protein, 113 aa, synthetic construct
  REGION 1..113: note = Synthetic
DVKLVESGGGLVKPGGSLKLSCAASGFAFSAYDMSWFRQTPEKRLEWVATINSGGSYTYYPDSVKGRFTISRDNARNTLYLQMSSLRSEDSALYYCARNVAYWGQGTLVTVSS

SEQ ID NO: 1960 - DNA, 339 bp, synthetic construct
  misc_feature 1..339: note = Synthetic
  source 1..339: mol_type = other DNA
gatgttaaattagttgaatctggtggtggtttagttaaacctggtggttctttaaaattatcttgtgctgcttctggttttgctttttctgcttatgatatgtcttggtttcgtcaaactcctgaaaaacgtttagaatgggttgctactattaattctggtggttcttatacttattatcctgattctgttaaaggtcgttttactatttctcgtgataatgctcgtaatactttatatttacaaatgtcttctttacgttctgaagattctgctttatattattgtgctcgtaatgttgcttattggggtcaaggtactttagttactgtttcttct

SEQ ID NO: 1961 - protein, 8 aa, synthetic construct
  REGION 1..8: note = Synthetic
GFPFGNYL

SEQ ID NO: 1962 - protein, 8 aa, synthetic construct
  REGION 1..8: note = Synthetic
ISGGGVST

SEQ ID NO: 1963 - protein, 12 aa, synthetic construct
  REGION 1..12: note = Synthetic
ARGPSTWPAFDV

SEQ ID NO: 1964 - protein, 119 aa, synthetic construct
  REGION 1..119: note = Synthetic
EVQLLESGGGLVQPGGSLRLSCAASGFPFGNYLMNWVRQAPGKGLEWVSVISGGGVSTYYADSVKGRFTISRDNSKNTLYLQMNSLRAEDTAVYYCARGPSTWPAFDVWGQGTLVTVSS

SEQ ID NO: 1965 - DNA, 357 bp, synthetic construct
  misc_feature 1..357: note = Synthetic
  source 1..357: mol_type = other DNA
gaagttcaattattagaatctggtggtggtttagttcaacctggtggttctttacgtttatcttgtgctgcttctggttttccttttggtaattatttaatgaattgggttcgtcaagctcctggtaaaggtttagaatgggtttctgttatttctggtggtggtgtttctacttattatgctgattctgttaaaggtcgttttactatttctcgtgataattctaaaaatactttatatttacaaatgaattctttacgtgctgaagatactgctgtttattattgtgctcgtggtccttctacttggcctgcttttgatgtttggggtcaaggtactttagttactgtttcttct

SEQ ID NO: 1966 - protein, 8 aa, synthetic construct
  REGION 1..8: note = Synthetic
GYTFTSYW

SEQ ID NO: 1967 - protein, 8 aa, synthetic construct
  REGION 1..8: note = Synthetic
IDPYDSET

SEQ ID NO: 1968 - protein, 9 aa, synthetic construct
  REGION 1..9: note = Synthetic
TRSGMDFDY

SEQ ID NO: 1969 - protein, 116 aa, synthetic construct
  REGION 1..116: note = Synthetic
EVQLQQPGAELVRPGASVKLSCKASGYTFTSYWMHWVKQRPGQGLEWIGRIDPYDSETHYNQKFKDKAILTVDTSSSTGYMQLSSLTYEDSAVYYCTRSGMDFDYWGQGTTVTVSS

SEQ ID NO: 1970 - DNA, 348 bp, synthetic construct
  misc_feature 1..348: note = Synthetic
  source 1..348: mol_type = other DNA
gaagttcaattacaacaacctggtgctgaattagttcgtcctggtgcttctgttaaattatcttgtaaagcttctggttatacttttacttcttattggatgcattgggttaaacaacgtcctggtcaaggtttagaatggattggtcgtattgatccttatgattctgaaactcattataatcaaaaatttaaagataaagctattttaactgttgatacttcttcttctactggttatatgcaattatcttctttaacttatgaagattctgctgtttattattgtactcgttctggtatggattttgattattggggtcaaggtactactgttactgtttcttct

SEQ ID NO: 1971 - protein, 8 aa, synthetic construct
  REGION 1..8: note = Synthetic
GFTFSNYA

SEQ ID NO: 1972 - protein, 7 aa, synthetic construct
  REGION 1..7: note = Synthetic
ISSGGST

SEQ ID NO: 1973 - protein, 9 aa, synthetic construct
  REGION 1..9: note = Synthetic
TRDLAWFPY

SEQ ID NO: 1974 - protein, 115 aa, synthetic construct
  REGION 1..115: note = Synthetic
EVKLVESGGGLVKPGGSLKLSCAASGFTFSNYAMSWVRQTPEKRLEWVASISSGGSTYYPDSVKGRFTISRDNARNILYLQMSSLRSEDTAMYCCTRDLAWFPYWGQGTLVTVSA

SEQ ID NO: 1975 - DNA, 345 bp, synthetic construct
  misc_feature 1..345: note = Synthetic
  source 1..345: mol_type = other DNA
gaagttaaattagttgaatctggtggtggtttagttaaacctggtggttctttaaaattatcttgtgctgcttctggttttactttttctaattatgctatgtcttgggttcgtcaaactcctgaaaaacgtttagaatgggttgcttctatttcttctggtggttctacttattatcctgattctgttaaaggtcgttttactatttctcgtgataatgctcgtaatattttatatttacaaatgtcttctttacgttctgaagatactgctatgtattgttgtactcgtgatttagcttggtttccttattggggtcaaggtactttagttactgtttctgct

SEQ ID NO: 1976 - protein, 8 aa, synthetic construct
  REGION 1..8: note = Synthetic
GFTFSSYA

SEQ ID NO: 1977 - protein, 8 aa, synthetic construct
  REGION 1..8: note = Synthetic
ISSGGSYT

SEQ ID NO: 1978 - protein, 11 aa, synthetic construct
  REGION 1..11: note = Synthetic
ASPYGYAWFAY

SEQ ID NO: 1979 - protein, 118 aa, synthetic construct
  REGION 1..118: note = Synthetic
EVMLVESGGGLVKPGGSLKLSCAASGFTFSSYAMSWVRQTPEKRLEWVATISSGGSYTYYPDSVKGRFTISRDNAKNTLYLQMISLRSEDTAMYYCASPYGYAWFAYWGQGTLVTVSA

SEQ ID NO: 1980 - DNA, 354 bp, synthetic construct
  misc_feature 1..354: note = Synthetic
  source 1..354: mol_type = other DNA
gaagttatgttagttgaatctggtggtggtttagttaaacctggtggttctttaaaattatcttgtgctgcttctggttttactttttcttcttatgctatgtcttgggttcgtcaaactcctgaaaaacgtttagaatgggttgctactatttcttctggtggttcttatacttattatcctgattctgttaaaggtcgttttactatttctcgtgataatgctaaaaatactttatatttacaaatgatttctttacgttctgaagatactgctatgtattattgtgcttctccttatggttatgcttggtttgcttattggggtcaaggtactttagttactgtttctgct

SEQ ID NO: 1981 - protein, 8 aa, synthetic construct
  REGION 1..8: note = Synthetic
GFTFTDYY

SEQ ID NO: 1982 - protein, 10 aa, synthetic construct
  REGION 1..10: note = Synthetic
IRNKANGYTT

SEQ ID NO: 1983 - protein, 13 aa, synthetic construct
  REGION 1..13: note = Synthetic
ARDRGWLRGYFDV

SEQ ID NO: 1984 - protein, 122 aa, synthetic construct; identical to SEQ ID NO: 594
  REGION 1..122: note = Synthetic

SEQ ID NO: 1985 - DNA, 366 bp, synthetic construct; identical to SEQ ID NO: 595
  misc_feature 1..366: note = Synthetic
  source 1..366: mol_type = other DNA

SEQ ID NO: 1986 - protein, 8 aa, synthetic construct
  REGION 1..8: note = Synthetic
GFNIKDTY

SEQ ID NO: 1987 - protein, 8 aa, synthetic construct
  REGION 1..8: note = Synthetic
IDPANGNT

SEQ ID NO: 1988 - protein, 7 aa, synthetic construct
  REGION 1..7: note = Synthetic
NAYGYDY

SEQ ID NO: 1989 - protein, 114 aa, synthetic construct
  REGION 1..114: note = Synthetic
EVKIEESGAELVKPGASVKLSCTASGFNIKDTYMHWVKQRPEQGLEWIGRIDPANGNTKYDPKFQGKATITADTSSNTTYLQLSSLTSEDTAVYYCNAYGYDYWGQGSTLTVSS

SEQ ID NO: 1990 - DNA, 342 bp, synthetic construct
  misc_feature 1..342: note = Synthetic
  source 1..342: mol_type = other DNA
gaagttaaaattgaagaatctggtgctgaattagttaaacctggtgcttctgttaaattatcttgtactgcttctggttttaatattaaagatacttatatgcattgggttaaacaacgtcctgaacaaggtttagaatggattggtcgtattgatcctgctaatggtaatactaaatatgatcctaaatttcaaggtaaagctactattactgctgatacttcttctaatactacttatttacaattatcttctttaacttctgaagatactgctgtttattattgtaatgcttatggttatgattattggggtcaaggttctactttaactgtttcttct

SEQ ID NO: 1991 - protein, 8 aa, synthetic construct
  REGION 1..8: note = Synthetic
GFTFTDYY

SEQ ID NO: 1992 - protein, 10 aa, synthetic construct
  REGION 1..10: note = Synthetic
IRNKANGYTT

SEQ ID NO: 1993 - protein, 13 aa, synthetic construct
  REGION 1..13: note = Synthetic
ARDDGNYGTGFAY

SEQ ID NO: 1994 - protein, 122 aa, synthetic construct
  REGION 1..122: note = Synthetic
EVKLVESGGGLVQPGTSLRLSCATSGFTFTDYYMSWVRQPPGKALEWLGFIRNKANGYTTEYSASVKGRFTISRDNSQSILYLQMNTLRAEDSATYYCARDDGNYGTGFAYWGQGTLVTVSA

SEQ ID NO: 1995 - DNA, 366 bp, synthetic construct
  misc_feature 1..366: note = Synthetic
  source 1..366: mol_type = other DNA
gaagttaaattagttgaatctggtggtggtttagttcaacctggtacttctttacgtttatcttgtgctacttctggttttacttttactgattattatatgtcttgggttcgtcaacctcctggtaaagctttagaatggttaggttttattcgtaataaagctaatggttatactactgaatattctgcttctgttaaaggtcgttttactatttctcgtgataattctcaatctattttatatttacaaatgaatactttacgtgctgaagattctgctacttattattgtgctcgtgatgatggtaattatggtactggttttgcttattggggtcaaggtactttagttactgtttctgct

SEQ ID NO: 1996 - protein, 8 aa, synthetic construct
  REGION 1..8: note = Synthetic
GFTFTYYY

SEQ ID NO: 1997 - protein, 10 aa, synthetic construct
  REGION 1..10: note = Synthetic
IRNKANGDTT

SEQ ID NO: 1998 - protein, 14 aa, synthetic construct
  REGION 1..14: note = Synthetic
ARDGGLRRGYYFDY

SEQ ID NO: 1999 - protein, 123 aa, synthetic construct
  REGION 1..123: note = Synthetic
DVQLVESGGGLVQPGDSLRLSCATSGFTFTYYYMSWVRQPPGKALEWLGFIRNKANGDTTEYSASVKGRFTISRDNSQSILYLQMNTLTGEDSATYYCARDGGLRRGYYFDYWGQGTTLTVSS

SEQ ID NO: 2000 - DNA, 369 bp, synthetic construct
  misc_feature 1..369: note = Synthetic
  source 1..369: mol_type = other DNA
gatgttcaattagttgaatctggtggtggtttagttcaacctggtgattctttacgtttatcttgtgctacttctggttttacttttacttattattatatgtcttgggttcgtcaacctcctggtaaagctttagaatggttaggttttattcgtaataaagctaatggtgatactactgaatattctgcttctgttaaaggtcgttttactatttctcgtgataattctcaatctattttatatttacaaatgaatactttaactggtgaagattctgctacttattattgtgctcgtgatggtggtttacgtcgtggttattattttgattattggggtcaaggtactactttaactgtttcttct

SEQ ID NO: 2001 - protein, 8 aa, synthetic construct
  REGION 1..8: note = Synthetic
GYTFTNYG

SEQ ID NO: 2002 - protein, 8 aa, synthetic construct
  REGION 1..8: note = Synthetic
IHPSDSET

SEQ ID NO: 2003 - protein, 11 aa, synthetic construct
  REGION 1..11: note = Synthetic
ARWGYDVGSDY

SEQ ID NO: 2004 - protein, 118 aa, synthetic construct
  REGION 1..118: note = Synthetic
EVKLVESGPELKKPGETVKISCKASGYTFTNYGMNWVKQRPGQGLEWIGMIHPSDSETRLNQKFKDKATLTVDKSSSTAYMQVSSLASEDSAVYYCARWGYDVGSDYWGQGTTLTVSS

SEQ ID NO: 2005 - DNA, 354 bp, synthetic construct
  misc_feature 1..354: note = Synthetic
  source 1..354: mol_type = other DNA
gaagttaaattagttgaatctggtcctgaattaaaaaaacctggtgaaactgttaaaatttcttgtaaagcttctggttatacttttactaattatggtatgaattgggttaaacaacgtcctggtcaaggtttagaatggattggtatgattcatccttctgattctgaaactcgtttaaatcaaaaatttaaagataaagctactttaactgttgataaatcttcttctactgcttatatgcaagtttcttctttagcttctgaagattctgctgtttattattgtgctcgttggggttatgatgttggttctgattattggggtcaaggtactactttaactgtttcttct

SEQ ID NO: 2006 - protein, 8 aa, synthetic construct
  REGION 1..8: note = Synthetic
GFTFTDYY

SEQ ID NO: 2007 - protein, 10 aa, synthetic construct
  REGION 1..10: note = Synthetic
IRNRPNFYTT

SEQ ID NO: 2008 - protein, 11 aa, synthetic construct
  REGION 1..11: note = Synthetic
VRDHWGWYFDV

SEQ ID NO: 2009 - protein, 120 aa, synthetic construct
  REGION 1..120: note = Synthetic
EVKLVESGGGLVQPGGSLRLSCATSGFTFTDYYMSWVRQPPGKALQWLAFIRNRPNFYTTEYSASVKGRFTISRDNSQSILYLQMNTLRAEDSATYYCVRDHWGWYFDVWGAGTTVTVSS

SEQ ID NO: 2010 - DNA, 360 bp, synthetic construct
  misc_feature 1..360: note = Synthetic
  source 1..360: mol_type = other DNA
gaagttaaattagttgaatctggtggtggtttagttcaacctggtggttctttacgtttatcttgtgctacttctggttttacttttactgattattatatgtcttgggttcgtcaacctcctggtaaagctttacaatggttagcttttattcgtaatcgtcctaatttttatactactgaatattctgcttctgttaaaggtcgttttactatttctcgtgataattctcaatctattttatatttacaaatgaatactttacgtgctgaagattctgctacttattattgtgttcgtgatcattggggttggtattttgatgtttggggtgctggtactactgttactgtttcttct

SEQ ID NO: 2011 - protein, 8 aa, synthetic construct
  REGION 1..8: note = Synthetic
GYTFTDYS

SEQ ID NO: 2012 - protein, 8 aa, synthetic construct
  REGION 1..8: note = Synthetic
INTETGEP

SEQ ID NO: 2013 - protein, 7 aa, synthetic construct
  REGION 1..7: note = Synthetic
AGLLFDY

SEQ ID NO: 2014 - protein, 114 aa, synthetic construct
  REGION 1..114: note = Synthetic
QIQLAQSGPELKKPGETVKISCKASGYTFTDYSIHWVKQAPGKGLKWMGWINTETGEPTYADDFKGRFDFSLETSASTAYLQINNLKNEDTATYFCAGLLFDYWGQGTTLTVSS

SEQ ID NO: 2015 - DNA, 342 bp, synthetic construct
  misc_feature 1..342: note = Synthetic
  source 1..342: mol_type = other DNA
caaattcaattagctcaatctggtcctgaattaaaaaaacctggtgaaactgttaaaatttcttgtaaagcttctggttatacttttactgattattctattcattgggttaaacaagctcctggtaaaggtttaaaatggatgggttggattaatactgaaactggtgaacctacttatgctgatgattttaaaggtcgttttgatttttctttagaaacttctgcttctactgcttatttacaaattaataatttaaaaaatgaagatactgctacttatttttgtgctggtttattatttgattattggggtcaaggtactactttaactgtttcttct

SEQ ID NO: 2016 - protein, 8 aa, synthetic construct
  REGION 1..8: note = Synthetic
GFPFGNYL

SEQ ID NO: 2017 - protein, 8 aa, synthetic construct
  REGION 1..8: note = Synthetic
ISGGGVST

SEQ ID NO: 2018 - protein, 11 aa, synthetic construct
  REGION 1..11: note = Synthetic
ARGPSSPAFDV

SEQ ID NO: 2019 - protein, 118 aa, synthetic construct
  REGION 1..118: note = Synthetic
EVQLLESGGGLVQPGGSLRLSCAASGFPFGNYLMNWVRQAPGKGLEWVSVISGGGVSTYYADSVKGRFTISRDNSKNTLYLQMNSLRAEDTAVYYCARGPSSPAFDVWGQGTLVTVSS

SEQ ID NO: 2020 - DNA, 354 bp, synthetic construct
  misc_feature 1..354: note = Synthetic
  source 1..354: mol_type = other DNA
gaagttcaattattagaatctggtggtggtttagttcaacctggtggttctttacgtttatcttgtgctgcttctggttttccttttggtaattatttaatgaattgggttcgtcaagctcctggtaaaggtttagaatgggtttctgttatttctggtggtggtgtttctacttattatgctgattctgttaaaggtcgttttactatttctcgtgataattctaaaaatactttatatttacaaatgaattctttacgtgctgaagatactgctgtttattattgtgctcgtggtccttcttctcctgcttttgatgtttggggtcaaggtactttagttactgtttcttct

SEQ ID NO: 2021 - protein, 8 aa, synthetic construct
  REGION 1..8: note = Synthetic
GFNIKDYY

SEQ ID NO: 2022 - protein, 8 aa, synthetic construct
  REGION 1..8: note = Synthetic
IDPENGDT

SEQ ID NO: 2023 - protein, 6 aa, synthetic construct
  REGION 1..6: note = Synthetic
NTGFDY

SEQ ID NO: 2024 - protein, 113 aa, synthetic construct; identical to SEQ ID NO: 444
  REGION 1..113: note = Synthetic

SEQ ID NO: 2025 - DNA, 339 bp, synthetic construct
  misc_feature 1..339: note = Synthetic
  source 1..339: mol_type = other DNA
caagcttatttacaacaatctggtgctgaattagttcgttctggtgcttctgttaaattatcttgtactgcttctggttttaatattaaagattattatatgcattgggttaaacaacgtcctgaacaaggtttagaatggattggttggattgatcctgaaaatggtgatactgaatatgctcctaaatttcaaggtaaagctactatgactgctgatacttcttctaatactgcttatttacaattatcttctttaacttctgaagatactgctgtttattattgtaatactggttttgattattggggtcaaggtactactttaactgtttcttct

SEQ ID NO: 2026 - protein, 8 aa, synthetic construct
  REGION 1..8: note = Synthetic
GFTFTDYY

SEQ ID NO: 2027 - protein, 10 aa, synthetic construct
  REGION 1..10: note = Synthetic
IRNKANGYTT

SEQ ID NO: 2028 - protein, 15 aa, synthetic construct
  REGION 1..15: note = Synthetic
ARNLHYYGSSYGFAY

SEQ ID NO: 2029 - protein, 124 aa, synthetic construct
  REGION 1..124: note = Synthetic
EVMLVESGGGLVQPGGSLRLSCATSGFTFTDYYMSWVRQPPGKALEWLGFIRNKANGYTTEYSASVKGRITISRDNSQSILYLQMNTLRVEDSATYYCARNLHYYGSSYGFAYWGQGTLVTVSA

SEQ ID NO: 2030 - DNA, 372 bp, synthetic construct
  misc_feature 1..372: note = Synthetic
  source 1..372: mol_type = other DNA
gaagttatgttagttgaatctggtggtggtttagttcaacctggtggttctttacgtttatcttgtgctacttctggttttacttttactgattattatatgtcttgggttcgtcaacctcctggtaaagctttagaatggttaggttttattcgtaataaagctaatggttatactactgaatattctgcttctgttaaaggtcgtattactatttctcgtgataattctcaatctattttatatttacaaatgaatactttacgtgttgaagattctgctacttattattgtgctcgtaatttacattattatggttcttcttatggttttgcttattggggtcaaggtactttagttactgtttctgct

SEQ ID NO: 2031 - protein, 8 aa, synthetic construct
  REGION 1..8: note = Synthetic
GFTFTDYF

SEQ ID NO: 2032 - protein, 10 aa, synthetic construct
  REGION 1..10: note = Synthetic
IRNKANGYTT

SEQ ID NO: 2033 - protein, 10 aa, synthetic construct
  REGION 1..10: note = Synthetic
ASGNPAWFAY

SEQ ID NO: 2034 - protein, 119 aa, synthetic construct
  REGION 1..119: note = Synthetic
EVKLVESGGGLVQPGGSLRLSCATSGFTFTDYFLNWVRQPPGKALEWLGFIRNKANGYTTDYSASVKGRFTISRDNSQSILYLQMNTLRAEDSATYYCASGNPAWFAYWGQGTLVTVSA

SEQ ID NO: 2035 - DNA, 357 bp, synthetic construct
  misc_feature 1..357: note = Synthetic
  source 1..357: mol_type = other DNA
gaagttaaattagttgaatctggtggtggtttagttcaacctggtggttctttacgtttatcttgtgctacttctggttttacttttactgattattttttaaattgggttcgtcaacctcctggtaaagctttagaatggttaggttttattcgtaataaagctaatggttatactactgattattctgcttctgttaaaggtcgttttactatttctcgtgataattctcaatctattttatatttacaaatgaatactttacgtgctgaagattctgctacttattattgtgcttctggtaatcctgcttggtttgcttattggggtcaaggtactttagttactgtttctgct

SEQ ID NO: 2036 - protein, 8 aa, synthetic construct
  REGION 1..8: note = Synthetic
GFTFTDYY

SEQ ID NO: 2037 - protein, 10 aa, synthetic construct
  REGION 1..10: note = Synthetic
IRNKANGYTT

SEQ ID NO: 2038 - protein, 11 aa, synthetic construct
  REGION 1..11: note = Synthetic
ARDDYDDYFAY

SEQ ID NO: 2039 - protein, 120 aa, synthetic construct; identical to SEQ ID NO: 474
  REGION 1..120: note = Synthetic

SEQ ID NO: 2040 - DNA, 360 bp, synthetic construct
  misc_feature 1..360: note = Synthetic
  source 1..360: mol_type = other DNA
gaagttttattagttgaatctggtggtggtttagttcaacctggtggttctttacgtttatcttgtgctacttctggttttacttttactgattattatatgtcttgggttcgtcaacctcctggtaaagctttagaatggttaggttttattcgtaataaagctaatggttatactactgaatattctgcttctgttaaaggtcgttttactatttctcgtgataattctcaatctattttatatttacaaatgaatactttacgtggtgaagattctgctacttattattgtgctcgtgatgattatgatgattattttgcttattggggtcaaggtactactttaactgtttcttct

SEQ ID NO: 2041 - protein, 8 aa, synthetic construct
  REGION 1..8: note = Synthetic
GFPFGNYL

SEQ ID NO: 2042 - protein, 8 aa, synthetic construct
  REGION 1..8: note = Synthetic
ISGGGVST

SEQ ID NO: 2043 - protein, 12 aa, synthetic construct
  REGION 1..12: note = Synthetic
ARGPSSWPAFDV

SEQ ID NO: 2044 - protein, 118 aa, synthetic construct; identical to SEQ ID NO: 404
  REGION 1..118: note = Synthetic

SEQ ID NO: 2045 - DNA, 354 bp, synthetic construct
  misc_feature 1..354: note = Synthetic
  source 1..354: mol_type = other DNA
gaagttcaattattagaatctggtggtggtttagttcaacctggtggttctttacgtttatcttgtgctgcttctggttttccttttggtaattatttaatgaattgggttcgtcaagctcctggtaaaggtttagaatgggtttctgttatttctggtggtggtgtttctacttattatgctgattctgttaaaggtcgttttactatttctcgtgataattctaaaaatactttatatttacaaatgaattctttacgtgctgaagatactgctgtttattgtgctcgtggtccttcttcttggcctgcttttgatgtttggggtcaaggtactttagttactgtttcttct

SEQ ID NO: 2046 - protein, 8 aa, synthetic construct
  REGION 1..8: note = Synthetic
GYTFTDYY

SEQ ID NO: 2047 - protein, 8 aa, synthetic construct
  REGION 1..8: note = Synthetic
IIPKNGDS

SEQ ID NO: 2048 - protein, 7 aa, synthetic construct
  REGION 1..7: note = Synthetic
ARGNEDY

SEQ ID NO: 2049 - protein, 114 aa, synthetic construct
  REGION 1..114: note = Synthetic
EVHLQQSGPELVKPGASVKMSCKASGYTFTDYYMKWVKQSHGESLEWIGDIIPKNGDSFYNQKFKGKATLTVDKSSSTAYMQLNSLTSEDSAVYYCARGNEDYWGQGTTLTVSS

SEQ ID NO: 2050 - DNA, 342 bp, synthetic construct
  misc_feature 1..342: note = Synthetic
  source 1..342: mol_type = other DNA
gaagttcatttacaacaatctggtcctgaattagttaaacctggtgcttctgttaaaatgtcttgtaaagcttctggttatacttttactgattattatatgaaatgggttaaacaatctcatggtgaatctttagaatggattggtgatattattcctaaaaatggtgattctttttataatcaaaaatttaaaggtaaagctactttaactgttgataaatcttcttctactgcttatatgcaattaaattctttaacttctgaagattctgctgtttattattgtgctcgtggtaatgaagattattggggtcaaggtactactttaactgtttcttct

SEQ ID NO: 2051 - protein, 8 aa, synthetic construct
  REGION 1..8: note = Synthetic
GFTFTDYY

SEQ ID NO: 2052 - protein, 10 aa, synthetic construct
  REGION 1..10: note = Synthetic
IRNKANGYTT

SEQ ID NO: 2053 - protein, 5 aa, synthetic construct
  REGION 1..5: note = Synthetic
ASLDY

SEQ ID NO: 2054 - protein, 114 aa, synthetic construct
  REGION 1..114: note = Synthetic
EVKLVESGGGLVQPGGSLRLSCATSGFTFTDYYMSWVRQPPGKALEWLGFIRNKANGYTTEYSASVKGRFTISRDNSQSILYLQMNTLRAEDSATYYCASLDYWGQGTTLTVSS

SEQ ID NO: 2055 - DNA, 342 bp, synthetic construct
  misc_feature 1..342: note = Synthetic
  source 1..342: mol_type = other DNA
gaagttaaattagttgaatctggtggtggtttagttcaacctggtggttctttacgtttatcttgtgctacttctggttttacttttactgattattatatgtcttgggttcgtcaacctcctggtaaagctttagaatggttaggttttattcgtaataaagctaatggttatactactgaatattctgcttctgttaaaggtcgttttactatttctcgtgataattctcaatctattttatatttacaaatgaatactttacgtgctgaagattctgctacttattattgtgcttctttagattattggggtcaaggtactactttaactgtttcttct

SEQ ID NO: 2056 - protein, 8 aa, synthetic construct
  REGION 1..8: note = Synthetic
GFTFSSFG

SEQ ID NO: 2057 - protein, 8 aa, synthetic construct
  REGION 1..8: note = Synthetic
ISSGSSII

SEQ ID NO: 2058 - protein, 14 aa, synthetic construct
  REGION 1..14: note = Synthetic
ARGASLTTATDFDY

SEQ ID NO: 2059 - protein, 121 aa, synthetic construct
  REGION 1..121: note = Synthetic
EVKLVESGGGLVQPGGFRKLSCTASGFTFSSFGMHWVRQAPEKGLEWVAYISSGSSIIYYADTVKGRFTISRDNPKNTLFLQMTSLRSEDTAMYYCARGASLTTATDFDYWGQGTTLTVSS

SEQ ID NO: 2060 - DNA, 363 bp, synthetic construct
  misc_feature 1..363: note = Synthetic
  source 1..363: mol_type = other DNA
gaagttaaattagttgaatctggtggtggtttagttcaacctggtggttttcgtaaattatcttgtactgcttctggttttactttttcttcttttggtatgcattgggttcgtcaagctcctgaaaaaggtttagaatgggttgcttatatttcttctggttcttctattatttattatgctgatactgttaaaggtcgttttactatttctcgtgataatcctaaaaatactttatttttacaaatgacttctttacgttctgaagatactgctatgtattattgtgctcgtggtgcttctttaactactgctactgattttgattattggggtcaaggtactactttaactgtttcttct

SEQ ID NO: 2061 - protein, 8 aa, synthetic construct
  REGION 1..8: note = Synthetic
GFTFTDYF

SEQ ID NO: 2062 - protein, 10 aa, synthetic construct
  REGION 1..10: note = Synthetic
IRNKANGYTT

SEQ ID NO: 2063 - protein, 15 aa, synthetic construct
  REGION 1..15: note = Synthetic
ARPSYYDYNGTWFAY

SEQ ID NO: 2064 - protein, 124 aa, synthetic construct; identical to SEQ ID NO: 574
  REGION 1..124: note = Synthetic

SEQ ID NO: 2065 - DNA, 372 bp, synthetic construct; identical to SEQ ID NO: 575
  misc_feature 1..372: note = Synthetic
  source 1..372: mol_type = other DNA

SEQ ID NO: 2066 - protein, 8 aa, synthetic construct
  REGION 1..8: note = Synthetic
GYTFTSYY

SEQ ID NO: 2067 - protein, 8 aa, synthetic construct
  REGION 1..8: note = Synthetic
INPTNGGT

SEQ ID NO: 2068 - protein, 13 aa, synthetic construct
  REGION 1..13: note = Synthetic
TRCGVPFQPYFDY

SEQ ID NO: 2069 - protein, 120 aa, synthetic construct
  REGION 1..120: note = Synthetic
QVQMKESGAELVKPGASVKLSCKASGYTFTSYYMYWVKQRPGQGLEWIGEINPTNGGTTFNEKFKSKATLTVDKSSSTAYMQLSSLTSEDSAVYYCTRCGVPFQPYFDYWGQGTTLTVSS

SEQ ID NO: 2070 - DNA, 360 bp, synthetic construct
  misc_feature 1..360: note = Synthetic
  source 1..360: mol_type = other DNA
caagttcaaatgaaagaatctggtgctgaattagttaaacctggtgcttctgttaaattatcttgtaaagcttctggttatacttttacttcttattatatgtattgggttaaacaacgtcctggtcaaggtttagaatggattggtgaaattaatcctactaatggtggtactacttttaatgaaaaatttaaatctaaagctactttaactgttgataaatcttcttctactgcttatatgcaattatcttctttaacttctgaagattctgctgtttattattgtactcgttgtggtgttccttttcaaccttattttgattattggggtcaaggtactactttaactgtttcttct

SEQ ID NO: 2071 - protein, 8 aa, synthetic construct
  REGION 1..8: note = Synthetic
GFTFTGYA

SEQ ID NO: 2072 - protein, 8 aa, synthetic construct
  REGION 1..8: note = Synthetic
ISSGGNYT

SEQ ID NO: 2073 - protein, 11 aa, synthetic construct
  REGION 1..11: note = Synthetic
ARYLGYIPFGY

SEQ ID NO: 2074 - protein, 118 aa, synthetic construct
  REGION 1..118: note = Synthetic
DVMLVESGGGSVKPGGSLKLSCAASGFTFTGYAMSWVRQTPEKRLEWVATISSGGNYTYYPDSLKGRFTISRDNAKKTLYLQMSSLRSEDTAMYYCARYLGYIPFGYWGQGTLVTVSA

SEQ ID NO: 2075 - DNA, 354 bp, synthetic construct
  misc_feature 1..354: note = Synthetic
  source 1..354: mol_type = other DNA
gatgttatgttagttgaatctggtggtggttctgttaaacctggtggttctttaaaattatcttgtgctgcttctggttttacttttactggttatgctatgtcttgggttcgtcaaactcctgaaaaacgtttagaatgggttgctactatttcttctggtggtaattatacttattatcctgattctttaaaaggtcgttttactatttctcgtgataatgctaaaaaaactttatatttacaaatgtcttctttacgttctgaagatactgctatgtattattgtgctcgttatttaggttatattccttttggttattggggtcaaggtactttagttactgtttctgct

SEQ ID NO: 2076 - protein, 8 aa, synthetic construct
  REGION 1..8: note = Synthetic
GYTFTSYW

SEQ ID NO: 2077 - protein, 8 aa, synthetic construct
  REGION 1..8: note = Synthetic
INPSNGGT

SEQ ID NO: 2078 - protein, 13 aa, synthetic construct
  REGION 1..13: note = Synthetic
TRDYYGSSSWFAY

SEQ ID NO: 2079 - protein, 120 aa, synthetic construct
  REGION 1..120: note = Synthetic
QVQLKQPGTELVKPGASVKLPCKASGYTFTSYWMHWVKHRPGQGLEWIGEINPSNGGTDFNEKFKSKATLTVDKSSSTAYMQLSSLTSEDSAVYYCTRDYYGSSSWFAYWGQGTLVTVSA

SEQ ID NO: 2080 - DNA, 360 bp, synthetic construct
  misc_feature 1..360: note = Synthetic
  source 1..360: mol_type = other DNA
caagttcaattaaaacaacctggtactgaattagttaaacctggtgcttctgttaaattaccttgtaaagcttctggttatacttttacttcttattggatgcattgggttaaacatcgtcctggtcaaggtttagaatggattggtgaaattaatccttctaatggtggtactgattttaatgaaaaatttaaatctaaagctactttaactgttgataaatcttcttctactgcttatatgcaattatcttctttaacttctgaagattctgctgtttattattgtactcgtgattattatggttcttcttcttggtttgcttattggggtcaaggtactttagttactgtttctgct

SEQ ID NO: 2081 - protein, 8 aa, synthetic construct
  REGION 1..8: note = Synthetic
GFTFIDYY

SEQ ID NO: 2082 - protein, 10 aa, synthetic construct
  REGION 1..10: note = Synthetic
IGNKTNDYTT

SEQ ID NO: 2083 - protein, 12 aa, synthetic construct
  REGION 1..12: note = Synthetic
VSLGRGYWYFDV

SEQ ID NO: 2084 - protein, 121 aa, synthetic construct
  REGION 1..121: note = Synthetic
EVMLVESGGGLVQPGGSLRLSCATSGFTFIDYYMSWVRQPPGKALEWLGFIGNKTNDYTTEYSASVKGRFTISRDNSQSILYLQMNTLRAEDSATYYCVSLGRGYWYFDVWGAGTTVTVSS

SEQ ID NO: 2085 - DNA, 363 bp, synthetic construct
  misc_feature 1..363: note = Synthetic
  source 1..363: mol_type = other DNA
gaagttatgttagttgaatctggtggtggtttagttcaacctggtggttctttacgtttatcttgtgctacttctggttttacttttattgattattatatgtcttgggttcgtcaacctcctggtaaagctttagaatggttaggttttattggtaataaaactaatgattatactactgaatattctgcttctgttaaaggtcgttttactatttctcgtgataattctcaatctattttatatttacaaatgaatactttacgtgctgaagattctgctacttattattgtgtttctttaggtcgtggttattggtattttgatgtttggggtgctggtactactgttactgtttcttct

SEQ ID NO: 2086 - protein, 8 aa, synthetic construct
  REGION 1..8: note = Synthetic
GFPFGNYL

SEQ ID NO: 2087 - protein, 8 aa, synthetic construct
  REGION 1..8: note = Synthetic
ISGGGVST

SEQ ID NO: 2088 - protein, 12 aa, synthetic construct
  REGION 1..12: note = Synthetic
AREGTGYWYFDV

SEQ ID NO: 2089 - protein, 119 aa, synthetic construct
  REGION 1..119: note = Synthetic
EVQLLESGGGLVQPGGSLRLSCAASGFPFGNYLMNWVRQAPGKGLEWVSVISGGGVSTYYADSVKGRFTISRDNSKNTLYLQMNSLRAEDTAMYYCAREGTGYWYFDVWGAGTTVTVSS

SEQ ID NO: 2090 - DNA, 357 bp, synthetic construct
  misc_feature 1..357: note = Synthetic
  source 1..357: mol_type = other DNA
gaagttcaattattagaatctggtggtggtttagttcaacctggtggttctttacgtttatcttgtgctgcttctggttttccttttggtaattatttaatgaattgggttcgtcaagctcctggtaaaggtttagaatgggtttctgttatttctggtggtggtgtttctacttattatgctgattctgttaaaggtcgttttactatttctcgtgataattctaaaaatactttatatttacaaatgaattctttacgtgctgaagatactgctatgtattattgtgctcgtgaaggtactggttattggtattttgatgtttggggtgctggtactactgttactgtttcttct

SEQ ID NO: 2091 - protein, 8 aa, synthetic construct
  REGION 1..8: note = Synthetic
GFTFSNYA

SEQ ID NO: 2092 - protein, 8 aa, synthetic construct
  REGION 1..8: note = Synthetic
ISNGGDYT

SEQ ID NO: 2093 - protein, 11 aa, synthetic construct
  REGION 1..11: note = Synthetic
ARRAYGEWFPY

SEQ ID NO: 2094 - protein, 118 aa, synthetic construct
  REGION 1..118: note = Synthetic
EVKLVESGGGLVKPGGSLKLSCAASGFTFSNYAMSWVRQTPEKRLDWVATISNGGDYTYYPDSVKGRFTISRDNAKNILYLQMSSLRSEDTAMYYCARRAYGEWFPYWGQGTLVTVSA

SEQ ID NO: 2095 - DNA, 354 bp, synthetic construct
  misc_feature 1..354: note = Synthetic
  source 1..354: mol_type = other DNA
gaagttaaattagttgaatctggtggtggtttagttaaacctggtggttctttaaaattatcttgtgctgcttctggttttactttttctaattatgctatgtcttgggttcgtcaaactcctgaaaaacgtttagattgggttgctactatttctaatggtggtgattatacttattatcctgattctgttaaaggtcgttttactatttctcgtgataatgctaaaaatattttatatttacaaatgtcttctttacgttctgaagatactgctatgtattattgtgctcgtcgtgcttatggtgaatggtttccttattggggtcaaggtactttagttactgtttctgct

SEQ ID NO: 2096 - protein, 8 aa, synthetic construct
  REGION 1..8: note = Synthetic
GFTFTDYY

SEQ ID NO: 2097 - protein, 10 aa, synthetic construct
  REGION 1..10: note = Synthetic
IRNKANGYTT

SEQ ID NO: 2098 - protein, 11 aa, synthetic construct
  REGION 1..11: note = Synthetic
ARDNYGLWFAY

SEQ ID NO: 2099 - protein, 120 aa, synthetic construct
  REGION 1..120: note = Synthetic
DVQLLESGGGLVQPGDSLRLSCATSGFTFTDYYMTWVRQPPGKALEWLGFIRNKANGYTTEYSASVKGRFTISRDNSQSILYLQMNTLRPEDSATYYCARDNYGLWFAYWGQGTLVTVSA

SEQ ID NO: 2100 - DNA, 360 bp, synthetic construct
  misc_feature 1..360: note = Synthetic
  source 1..360: mol_type = other DNA
gatgttcaattattagaatctggtggtggtttagttcaacctggtgattctttacgtttatcttgtgctacttctggttttacttttactgattattatatgacttgggttcgtcaacctcctggtaaagctttagaatggttaggttttattcgtaataaagctaatggttatactactgaatattctgcttctgttaaaggtcgttttactatttctcgtgataattctcaatctattttatatttacaaatgaatactttacgtcctgaagattctgctacttattattgtgctcgtgataattatggtttatggtttgcttattggggtcaaggtactttagttactgtttctgct

SEQ ID NO: 2101 - protein, 9 aa, synthetic construct
  REGION 1..9: note = Synthetic
GYSITSDYA

SEQ ID NO: 2102 - protein, 7 aa, synthetic construct
  REGION 1..7: note = Synthetic
ISYSGYT

SEQ ID NO: 2103 - protein, 10 aa, synthetic construct
  REGION 1..10: note = Synthetic
ARNYGRYFDV

SEQ ID NO: 2104 - protein, 117 aa, synthetic construct
  REGION 1..117: note = Synthetic
QMQLKESGPGLVKPSQSLSLTCTVTGYSITSDYAWNWIRQFPGNKLEWMGYISYSGYTSYNPSLKSRISITRDTSKNQFFLQLNSVTSEDTATYYCARNYGRYFDVWGAGTTVTVSS

SEQ ID NO: 2105 - DNA, 351 bp, synthetic construct
  misc_feature 1..351: note = Synthetic
  source 1..351: mol_type = other DNA
caaatgcaattaaaagaatctggtcctggtttagttaaaccttctcaatctttatctttaacttgtactgttactggttattctattacttctgattatgcttggaattggattcgtcaatttcctggtaataaattagaatggatgggttatatttcttattctggttatacttcttataatccttctttaaaatctcgtatttctattactcgtgatacttctaaaaatcaattttttttacaattaaattctgttacttctgaagatactgctacttattattgtgctcgtaattatggtcgttattttgatgtttggggtgctggtactactgttactgtttcttct

SEQ ID NO: 2106 - protein, 8 aa, synthetic construct
  REGION 1..8: note = Synthetic
GFPFGNYL

SEQ ID NO: 2107 - protein, 8 aa, synthetic construct
  REGION 1..8: note = Synthetic
ISGGGVST

SEQ ID NO: 2108 - protein, 9 aa, synthetic construct
  REGION 1..9: note = Synthetic
ARDRNYFDY

SEQ ID NO: 2109 - protein, 116 aa, synthetic construct
  REGION 1..116: note = Synthetic
EVQLLESGGGLVQPGGSLRLSCAASGFPFGNYLMNWVRQAPGKGLEWVSVISGGGVSTYYADSVKGRFTISRDNSKNTLYLQMSSLKSEDTAMYYCARDRNYFDYWGQGTTLTVSS

SEQ ID NO: 2110 - DNA, 348 bp, synthetic construct
  misc_feature 1..348: note = Synthetic
  source 1..348: mol_type = other DNA
gaagttcaattattagaatctggtggtggtttagttcaacctggtggttctttacgtttatcttgtgctgcttctggttttccttttggtaattatttaatgaattgggttcgtcaagctcctggtaaaggtttagaatgggtttctgttatttctggtggtggtgtttctacttattatgctgattctgttaaaggtcgttttactatttctcgtgataattctaaaaatactttatatttacaaatgtcttctttaaaatctgaagatactgctatgtattattgtgctcgtgatcgtaattattttgattattggggtcaaggtactactttaactgtttcttct

SEQ ID NO: 2111 - protein, 8 aa, synthetic construct
  REGION 1..8: note = Synthetic
GYSFTSYY

SEQ ID NO: 2112 - protein, 8 aa, synthetic construct
  REGION 1..8: note = Synthetic
ILPGSGST

SEQ ID NO: 2113 - protein, 12 aa, synthetic construct
  REGION 1..12: note = Synthetic
AKGGGSLWYFDV

SEQ ID NO: 2114 - protein, 119 aa, synthetic construct; identical to SEQ ID NO: 394
  REGION 1..119: note = Synthetic

SEQ ID NO: 2115 - DNA, 357 bp, synthetic construct
  misc_feature 1..357: note = Synthetic
  source 1..357: mol_type = other DNA
caagcttatttacaacaatctggtactgaattagttaaacctggtgcttctgttaaattatcttgtaaagcttctggttattcttttacttcttattatatgttttgggttaaaaaacgtcctggtcaaggtttagaatggattggtgaaattttacctggttctggttctactaattataatgaacaatttaaaggtaaagctacttttactgctgatccttcttctaatactgcttatatgcaattatcttctttaacttctgaagattctgctgtttattattgtgctaaaggtggtggttctttatggtattttgatgtttggggtgctggtactactgttactgtttcttct

SEQ ID NO: 2116 - protein, 8 aa, synthetic construct
  REGION 1..8: note = Synthetic
GYTFTSYW

SEQ ID NO: 2117 - protein, 8 aa, synthetic construct
  REGION 1..8: note = Synthetic
ISPSNGGA

SEQ ID NO: 2118 - protein, 11 aa, synthetic construct
  REGION 1..11: note = Synthetic
TRGDLAGTVDY

SEQ ID NO: 2119 - protein, 118 aa, synthetic construct
  REGION 1..118: note = Synthetic
QVQLQQPGAELVRPGASVKLSCKASGYTFTSYWINWVKQRPGQGLEWIGEISPSNGGANFNKKFKSKATLTVDKSSSTAYMQLSSLTSEDSAVYYCTRGDLAGTVDYWGQGTTLTVSS

SEQ ID NO: 2120 - DNA, 354 bp, synthetic construct
  misc_feature 1..354: note = Synthetic
  source 1..354: mol_type = other DNA
caagttcaattacaacaacctggtgctgaattagttcgtcctggtgcttctgttaaattatcttgtaaagcttctggttatacttttacttcttattggattaattgggttaaacaacgtcctggtcaaggtttagaatggattggtgaaatttctccttctaatggtggtgctaattttaataaaaaatttaaatctaaagctactttaactgttgataaatcttcttctactgcttatatgcaattatcttctttaacttctgaagattctgctgtttattattgtactcgtggtgatttagctggtactgttgattattggggtcaaggtactactttaactgtttcttct

SEQ ID NO: 2121 - protein, 8 aa, synthetic construct
  REGION 1..8: note = Synthetic
GYTFTNYG

SEQ ID NO: 2122 - protein, 8 aa, synthetic construct
  REGION 1..8: note = Synthetic
IDTYTGEP

SEQ ID NO: 2123 - protein, 9 aa, synthetic construct
  REGION 1..9: note = Synthetic
SRQLGLLDY

SEQ ID NO: 2124 - protein, 116 aa, synthetic construct; identical to SEQ ID NO: 454
  REGION 1..116: note = Synthetic

SEQ ID NO: 2125 - DNA, 348 bp, synthetic construct
  misc_feature 1..348: note = Synthetic
  source 1..348: mol_type = other DNA
caagttcaattacaacaatctggtcctgaattaaaaaaacctggtgaaactgttaaaatttcttgtaaagcttctggttatacttttactaattatggtatgaattgggttaaacaagctcctggtaaaggtttaaaatggatgggttggattgatacttatactggtgaacctacttatgctgatgattttaaaggtcgttttgctttttctttagaaacttctgcttctactgcttatttacaaattaataatttaaaaaatgaagatactgctacttatttttgttctcgtcaattaggtttattagattattggggtcaaggtactactttaactgtttcttct

SEQ ID NO: 2126 - protein, 8 aa, synthetic construct
  REGION 1..8: note = Synthetic
GYTFTTAG

SEQ ID NO: 2127 - protein, 8 aa, synthetic construct
  REGION 1..8: note = Synthetic
INTHSGVP

SEQ ID NO: 2128 - protein, 14 aa, synthetic construct
  REGION 1..14: note = Synthetic
ARSPPYDSTWGFAY

SEQ ID NO: 2129 - protein, 121 aa, synthetic construct
  REGION 1..121: note = Synthetic
QIQLAQSGPELKKPGETVRISCKASGYTFTTAGMQWVQKMPGKGLKWIGWINTHSGVPKYAEDFKGRFAFSLETSASTAYLQISNLKNEDTATYFCARSPPYDSTWGFAYWGQGTLVTVSA

SEQ ID NO: 2130 - DNA, 363 bp, synthetic construct
  misc_feature 1..363: note = Synthetic
  source 1..363: mol_type = other DNA
caaattcaattagctcaatctggtcctgaattaaaaaaacctggtgaaactgttcgtatttcttgtaaagcttctggttatacttttactactgctggtatgcaatgggttcaaaaaatgcctggtaaaggtttaaaatggattggttggattaatactcattctggtgttcctaaatatgctgaagattttaaaggtcgttttgctttttctttagaaacttctgcttctactgcttatttacaaatttctaatttaaaaaatgaagatactgctacttatttttgtgctcgttctcctccttatgattctacttggggttttgcttattggggtcaaggtactttagttactgtttctgct

SEQ ID NO: 2131 - protein, 8 aa, synthetic construct
  REGION 1..8: note = Synthetic
GYTFSSYW

SEQ ID NO: 2132 - protein, 8 aa, synthetic construct
  REGION 1..8: note = Synthetic
INPSNGRT

SEQ ID NO: 2133 - protein, 14 aa, synthetic construct
  REGION 1..14: note = Synthetic
TRPYYRYDDWYFDV

SEQ ID NO: 2134 - protein, 121 aa, synthetic construct
  REGION 1..121: note = Synthetic
QVHLQQSGAELMKPGASVKISCKATGYTFSSYWIEWVKQRPGHGLEWIGEINPSNGRTNYNEKFKSTATLTVDKSSSTAYMQLSSLTSEDSAVYYCTRPYYRYDDWYFDVWGAGTTVTVSS

SEQ ID NO: 2135 - DNA, 363 bp, synthetic construct
  misc_feature 1..363: note = Synthetic
  source 1..363: mol_type = other DNA
caagttcatttacaacaatctggtgctgaattaatgaaacctggtgcttctgttaaaatttcttgtaaagctactggttatactttttcttcttattggattgaatgggttaaacaacgtcctggtcatggtttagaatggattggtgaaattaatccttctaatggtcgtactaattataatgaaaaatttaaatctactgctactttaactgttgataaatcttcttctactgcttatatgcaattatcttctttaacttctgaagattctgctgtttattattgtactcgtccttattatcgttatgatgattggtattttgatgtttggggtgctggtactactgttactgtttcttct

SEQ ID NO: 2136 - protein, 9 aa, synthetic construct
  REGION 1..9: note = Synthetic
GDSITSDYA

SEQ ID NO: 2137 - protein, 7 aa, synthetic construct
  REGION 1..7: note = Synthetic
ISYSGNT

SEQ ID NO: 2138 - protein, 10 aa, synthetic construct
  REGION 1..10: note = Synthetic
VRGMLTAFAY

SEQ ID NO: 2139 - protein, 117 aa, synthetic construct; identical to SEQ ID NO: 524
  REGION 1..117: note = Synthetic

SEQ ID NO: 2140 - DNA, 351 bp, synthetic construct; identical to SEQ ID NO: 555
  misc_feature 1..351: note = Synthetic
  source 1..351: mol_type = other DNA

SEQ ID NO: 2141 - protein, 8 aa, synthetic construct
  REGION 1..8: note = Synthetic
GYTFTSYW

SEQ ID NO: 2142 - protein, 8 aa, synthetic construct
  REGION 1..8: note = Synthetic
INPSNGRI

SEQ ID NO: 2143 - protein, 14 aa, synthetic construct
  REGION 1..14: note = Synthetic
ARQGTYSYDAWFAY

SEQ ID NO: 2144 - protein, 121 aa, synthetic construct
  REGION 1..121: note = Synthetic
QVQLQQPGAELVKPGASVKLSCKASGYTFTSYWMHWVKQRPGQGLEWIGEINPSNGRINYNEKFKSTATLTVDKSSSTAYMQLSSLTSEDSAVYYCARQGTYSYDAWFAYWGQGTLVTVSA

SEQ ID NO: 2145 - DNA, 363 bp, synthetic construct
  misc_feature 1..363: note = Synthetic
  source 1..363: mol_type = other DNA
caagttcaattacaacaacctggtgctgaattagttaaacctggtgcttctgttaaattatcttgtaaagcttctggttatacttttacttcttattggatgcattgggttaaacaacgtcctggtcaaggtttagaatggattggtgaaattaatccttctaatggtcgtattaattataatgaaaaatttaaatctactgctactttaactgttgataaatcttcttctactgcttatatgcaattatcttctttaacttctgaagattctgctgtttattattgtgctcgtcaaggtacttattcttatgatgcttggtttgcttattggggtcaaggtactttagttactgtttctgct

SEQ ID NO: 2146 - protein, 8 aa, synthetic construct
  REGION 1..8: note = Synthetic
GFTFSTYA

SEQ ID NO: 2147 - protein, 8 aa, synthetic construct
  REGION 1..8: note = Synthetic
ISSGGSYT

SEQ ID NO: 2148 - protein, 12 aa, synthetic construct
  REGION 1..12: note = Synthetic
ARGSYGNYWFAY

SEQ ID NO: 2149 - protein, 119 aa, synthetic construct
  REGION 1..119: note = Synthetic
EVLLVESGGGLVKPGGSLKLSCAASGFTFSTYAMSWVRQTPEKRLEWVATISSGGSYTYYPDSVKGRFTISRDNAKNTLYLQMSSLRSEDTAMYYCARGSYGNYWFAYWGQGTLVTVSA

SEQ ID NO: 2150 - DNA, 357 bp, synthetic construct
  misc_feature 1..357: note = Synthetic
  source 1..357: mol_type = other DNA
gaagttttattagttgaatctggtggtggtttagttaaacctggtggttctttaaaattatcttgtgctgcttctggttttactttttctacttatgctatgtcttgggttcgtcaaactcctgaaaaacgtttagaatgggttgctactatttcttctggtggttcttatacttattatcctgattctgttaaaggtcgttttactatttctcgtgataatgctaaaaatactttatatttacaaatgtcttctttacgttctgaagatactgctatgtattattgtgctcgtggttcttatggtaattattggtttgcttattggggtcaaggtactttagttactgtttctgct

SEQ ID NO: 2151 - protein, 8 aa, synthetic construct
  REGION 1..8: note = Synthetic
GFNIKDTY

SEQ ID NO: 2152 - protein, 8 aa, synthetic construct
  REGION 1..8: note = Synthetic
IDPANGDT

SEQ ID NO: 2153 - protein, 9 aa, synthetic construct
  REGION 1..9: note = Synthetic
ARGGYGYTY

SEQ ID NO: 2154 - protein, 116 aa, synthetic construct
  REGION 1..116: note = Synthetic
EVRLQQSGAELVKPGASVKLSCTASGFNIKDTYMHWVKQRPEQGLEWIGRIDPANGDTEYDPRFQGKATITATTSSNTAYLQLSSQTSEDSAVYYCARGGYGYTYWGQGTTLTVSS

SEQ ID NO: 2155 - DNA, 348 bp, synthetic construct
  misc_feature 1..348: note = Synthetic
  source 1..348: mol_type = other DNA
gaagttcgtttacaacaatctggtgctgaattagttaaacctggtgcttctgttaaattatcttgtactgcttctggttttaatattaaagatacttatatgcattgggttaaacaacgtcctgaacaaggtttagaatggattggtcgtattgatcctgctaatggtgatactgaatatgatcctcgttttcaaggtaaagctactattactgctactacttcttctaatactgcttatttacaattatcttctcaaacttctgaagattctgctgtttattattgtgctcgtggtggttatggttatacttattggggtcaaggtactactttaactgtttcttct

SEQ ID NO: 2156 - protein, 8 aa, synthetic construct
  REGION 1..8: note = Synthetic
GFNISDYY

SEQ ID NO: 2157 - protein, 8 aa, synthetic construct
  REGION 1..8: note = Synthetic
IDPANGDT

SEQ ID NO: 2158 - protein, 7 aa, synthetic construct
  REGION 1..7: note = Synthetic
KDGHFDS

SEQ ID NO: 2159 - protein, 114 aa, synthetic construct
  REGION 1..114: note = Synthetic
EVRLQQSGAELVRSGASVKLSCSASGFNISDYYVHWVKQRPEQGLEWIGWIDPANGDTEYAPKFQDKATLTADPSSNTAYLQLSSLTSEDTAVYYCKDGHFDSWGQGTTLTVSS

SEQ ID NO: 2160 - DNA, 342 bp, synthetic construct
  misc_feature 1..342: note = Synthetic
  source 1..342: mol_type = other DNA
gaagttcgtttacaacaatctggtgctgaattagttcgttctggtgcttctgttaaattatcttgttctgcttctggttttaatatttctgattattatgttcattgggttaaacaacgtcctgaacaaggtttagaatggattggttggattgatcctgctaatggtgatactgaatatgctcctaaatttcaagataaagctactttaactgctgatccttcttctaatactgcttatttacaattatcttctttaacttctgaagatactgctgtttattattgtaaagatggtcattttgattcttggggtcaaggtactactttaactgtttcttct

SEQ ID NO: 2161 - protein, 8 aa, synthetic construct
  REGION 1..8: note = Synthetic
GFPFGNYL

SEQ ID NO: 2162 - protein, 8 aa, synthetic construct
  REGION 1..8: note = Synthetic
ISGGGVST

SEQ ID NO: 2163 - protein, 12 aa, synthetic construct
  REGION 1..12: note = Synthetic
ARGPSSWPAFDV

SEQ ID NO: 2164 - protein, 119 aa, synthetic construct; identical to SEQ ID NO: 434
  REGION 1..119: note = Synthetic

SEQ ID NO: 2165 - DNA, 357 bp, synthetic construct; identical to SEQ ID NO: 545
  misc_feature 1..357: note = Synthetic
  source 1..357: mol_type = other DNA

SEQ ID NO: 2166 - protein, 8 aa, synthetic construct
  REGION 1..8: note = Synthetic
GYTFTSYW

SEQ ID NO: 2167 - protein, 8 aa, synthetic construct
  REGION 1..8: note = Synthetic
IDPYDSET

SEQ ID NO: 2168 - protein, 13 aa, synthetic construct
  REGION 1..13: note = Synthetic
ASRFITTVLGFDY

SEQ ID NO: 2169 - protein, 120 aa, synthetic construct
  REGION 1..120: note = Synthetic
QIQLQQPGAELVKPGASVKLSCKASGYTFTSYWMNWVKQRPEQGLEWIGRIDPYDSETHYNQKFKDKAILTVDKSSSTAYMQLSSLTSEDSAVYYCASRFITTVLGFDYWGQGTTLTVSS

SEQ ID NO: 2170 - DNA, 360 bp, synthetic construct
  misc_feature 1..360: note = Synthetic
  source 1..360: mol_type = other DNA
caaattcaattacaacaacctggtgctgaattagttaaacctggtgcttctgttaaattatcttgtaaagcttctggttatacttttacttcttattggatgaattgggttaaacaacgtcctgaacaaggtttagaatggattggtcgtattgatccttatgattctgaaactcattataatcaaaaatttaaagataaagctattttaactgttgataaatcttcttctactgcttatatgcaattatcttctttaacttctgaagattctgctgtttattattgtgcttctcgttttattactactgttttaggttttgattattggggtcaaggtactactttaactgtttcttct

SEQ ID NO: 2171 - protein, 8 aa, synthetic construct
  REGION 1..8: note = Synthetic
GFNIKDTY

SEQ ID NO: 2172 - protein, 8 aa, synthetic construct
  REGION 1..8: note = Synthetic
IDPENGNT

SEQ ID NO: 2173 - protein, 6 aa, synthetic construct
  REGION 1..6: note = Synthetic
IRSGHY

SEQ ID NO: 2174 - protein, 113 aa, synthetic construct; identical to SEQ ID NO: 414
  REGION 1..113: note = Synthetic

SEQ ID NO: 2175 - DNA, 339 bp, synthetic construct
  misc_feature 1..339: note = Synthetic
  source 1..339: mol_type = other DNA
gaagttcgtttacaacaatctggtgctgaattagttaaacctggtgcttctgttaaattatcttgtactgcttctggttttaatattaaagatacttatatgcattgggttaaacaacgtcctgaacaaggtttagaatggattggttggattgatcctgaaaatggtaatactaaatatgatcctaaatttcaaggtaaagctactattactactgatacttcttctaatactgcttatttacaattatcttctttaacttctgaagattctgctgtttattattgtattcgttctggtcattattggggtcaaggtactactgttactgtttcttct

SEQ ID NO: 2176 - protein, 8 aa, synthetic construct
  REGION 1..8: note = Synthetic
GYTFTSYW

SEQ ID NO: 2177 - protein, 8 aa, synthetic construct
  REGION 1..8: note = Synthetic
IDPSDYET

SEQ ID NO: 2178 - protein, 11 aa, synthetic construct
  REGION 1..11: note = Synthetic
TRGDYRSWFAY

SEQ ID NO: 2179 - protein, 118 aa, synthetic construct
  REGION 1..118: note = Synthetic
QIQLQQPGAELVKPGASVKLSCKASGYTFTSYWMNWVKQRPGRGLEWIGRIDPSDYETHYNQNFKDKATLTIDKSSSTAYMELRSLTSEDSAVYYCTRGDYRSWFAYWGQGTLVTVSA

SEQ ID NO: 2180 - DNA, 354 bp, synthetic construct
  misc_feature 1..354: note = Synthetic
  source 1..354: mol_type = other DNA
caaattcaattacaacaacctggtgctgaattagttaaacctggtgcttctgttaaattatcttgtaaagcttctggttatacttttacttcttattggatgaattgggttaaacaacgtcctggtcgtggtttagaatggattggtcgtattgatccttctgattatgaaactcattataatcaaaattttaaagataaagctactttaactattgataaatcttcttctactgcttatatggaattacgttctttaacttctgaagattctgctgtttattattgtactcgtggtgattatcgttcttggtttgcttattggggtcaaggtactttagttactgtttctgct

SEQ ID NO: 2181 - protein, 8 aa, synthetic construct
  REGION 1..8: note = Synthetic
GYTFTSYD

SEQ ID NO: 2182 - protein, 8 aa, synthetic construct
  REGION 1..8: note = Synthetic
IFPGDGTS

SEQ ID NO: 2183 - protein, 7 aa, synthetic construct
  REGION 1..7: note = Synthetic
ARKLGAY

SEQ ID NO: 2184 - protein, 114 aa, synthetic construct
  REGION 1..114: note = Synthetic
EVQLVQSGAEVKKPGASVKLSCKASGYTFTSYDINWVRQAPGQGLEWIGWIFPGDGTSKYAQKFQGRATLTTDKSTSTAYMELSSLRSEDTAVYYCARKLGAYWGQGTTLTVSS

SEQ ID NO: 2185 - DNA, 342 bp, synthetic construct
  misc_feature 1..342: note = Synthetic
  source 1..342: mol_type = other DNA
gaagttcaattagttcaatctggtgctgaagttaaaaaacctggtgcttctgttaaattatcttgtaaagcttctggttatacttttacttcttatgatattaattgggttcgtcaagctcctggtcaaggtttagaatggattggttggatttttcctggtgatggtacttctaaatatgctcaaaaatttcaaggtcgtgctactttaactactgataaatctacttctactgcttatatggaattatcttctttacgttctgaagatactgctgtttattattgtgctcgtaaattaggtgcttattggggtcaaggtactactttaactgtttcttct

SEQ ID NO: 2186 - protein, 8 aa, synthetic construct
  REGION 1..8: note = Synthetic
GYTFTSYD

SEQ ID NO: 2187 - protein, 8 aa, synthetic construct
  REGION 1..8: note = Synthetic
IFPGDGTS

SEQ ID NO: 2188 - protein, 7 aa, synthetic construct
  REGION 1..7: note = Synthetic
ARRAGNY

SEQ ID NO: 2189 - protein, 114 aa, synthetic construct; identical to SEQ ID NO: 504
  REGION 1..114: note = Synthetic

SEQ ID NO: 2190 - DNA, 342 bp, synthetic construct
  misc_feature 1..342: note = Synthetic
  source 1..342: mol_type = other DNA
gaagttcaattagttcaatctggtgctgaagttaaaaaacctggtgcttctgttaaattatcttgtaaagcttctggttatacttttacttcttatgatattaattgggttcgtcaagctcctggtcaaggtttagaatggattggttggatttttcctggtgatggtacttctaaatatgctcaaaaatttcaaggtcgtgctactttaactactgataaatctacttctactgcttatatggaattatcttctttacgttctgaagatactgctgtttattattgtgctcgtcgtgctggtaattattggggtcaaggtactactttaactgtttcttct

SEQ ID NO: 2191 - protein, 11 aa, synthetic construct
  REGION 1..11: note = Synthetic
QSLVHSNGNTY

SEQ ID NO: 2192 - skipped

SEQ ID NO: 2193 - protein, 10 aa, synthetic construct
  REGION 1..10: note = Synthetic
SQSTHVPPYT

SEQ ID NO: 2194 - protein, 113 aa, synthetic construct; identical to SEQ ID NO: 399
  REGION 1..113: note = Synthetic

SEQ ID NO: 2195 - DNA, 339 bp, synthetic construct; identical to SEQ ID NO: 630
  misc_feature 1..339: note = Synthetic
  source 1..339: mol_type = other DNA

SEQ ID NO: 2196 - protein, 10 aa, synthetic construct
  REGION 1..10: note = Synthetic
QSVDSDGDSY

SEQ ID NO: 2197 - skipped

SEQ ID NO: 2198 - protein, 9 aa, synthetic construct
  REGION 1..9: note = Synthetic
QQSHEYPFT

SEQ ID NO: 2199 - protein, 111 aa, synthetic construct; identical to SEQ ID NO: 419
  REGION 1..111: note = Synthetic

SEQ ID NO: 2200 - DNA, 333 bp, synthetic construct
  misc_feature 1..333: note = Synthetic
  source 1..333: mol_type = other DNA
gatattcaattaactcaatctccttcttctttatctgcttctgttggtgatcgtgttactattacttgtaaagcttctcaatctgttgattctgatggtgattcttatatgaattggtatcaacaaaaacctggtaaagctcctaaattattaatttatggtgcttctaatttagaatctggtgttccttctcgtttttctggttctggttctggtactgattttactttaactatttcttctttacaacctgaagattttgctacttattattgtcaacaatctcatgaatatccttttacttttggtcaaggtactaaattagaaattaaa

SEQ ID NO: 2201 - protein, 6 aa, synthetic construct
  REGION 1..6: note = Synthetic
QSISSY

SEQ ID NO: 2202 - skipped

SEQ ID NO: 2203 - protein, 9 aa, synthetic construct
  REGION 1..9: note = Synthetic
QQSYGNPPT

SEQ ID NO: 2204 - protein, 107 aa, synthetic construct; identical to SEQ ID NO: 289
  REGION 1..107: note = Synthetic

SEQ ID NO: 2205 - DNA, 321 bp, synthetic construct; identical to SEQ ID NO: 290
  misc_feature 1..321: note = Synthetic
  source 1..321: mol_type = other DNA

SEQ ID NO: 2206 - protein, 6 aa, synthetic construct
  REGION 1..6: note = Synthetic
ETISNF

SEQ ID NO: 2207 - skipped

SEQ ID NO: 2208 - protein, 9 aa, synthetic construct
  REGION 1..9: note = Synthetic
QQFYSVPWT

SEQ ID NO: 2209 - protein, 107 aa, synthetic construct; identical to SEQ ID NO: 429
  REGION 1..107: note = Synthetic

SEQ ID NO: 2210 - DNA, 321 bp, synthetic construct
  misc_feature 1..321: note = Synthetic
  source 1..321: mol_type = other DNA
gatattcaaatgactcaatctccttcttctttatctgcttctgttggtgatcgtgttactattacttgtcgtgcttctgaaactatttctaattttttaaattggtatcaacaaaaacctggtaaagctcctaaattattaatttatactacttcttctttacaacgtggtgttccttctcgtttttctggttctggttctggtactgattttactttaactatttcttctttacaacctgaagattttgctacttattattgtcaacaattttattctgttccttggacttttggtggtggtactaaagttgaaattaaa

SEQ ID NO: 2211 - protein, 6 aa, synthetic construct
  REGION 1..6: note = Synthetic
ETISNF

SEQ ID NO: 2212 - skipped

SEQ ID NO: 2213 - protein, 9 aa, synthetic construct
  REGION 1..9: note = Synthetic
QQSYSVPWT

SEQ ID NO: 2214 - protein, 106 aa, synthetic construct; identical to SEQ ID NO: 489
  REGION 1..106: note = Synthetic

SEQ ID NO: 2215 - DNA, 318 bp, synthetic construct
  misc_feature 1..318: note = Synthetic
  source 1..318: mol_type = other DNA
gatattcaaatgactcaatctccttcttctttatctgcttctgttggtgatcgtgttactattacttgtcgtgcttctgaaactatttctaattttttaaattggtatcaacaaaaacctggtaaagctcctaaattattaatttatactacttcttctttacaacgtggtgttccttctcgtttttctggttctggttctggtactgattttactttaactatttcttctttacaacctgaagattttgctacttattattgtcaacaatcttattctgttccttggacttttggtggtactaaagttgaaattaaa

SEQ ID NO: 2216 - protein, 6 aa, synthetic construct
  REGION 1..6: note = Synthetic
ETISNF

SEQ ID NO: 2217 - skipped

SEQ ID NO: 2218 - protein, 9 aa, synthetic construct
  REGION 1..9: note = Synthetic
QQSYSVPWT

SEQ ID NO: 2219 - protein, 106 aa, synthetic construct
  REGION 1..106: note = Synthetic
DIQMTQSPSSLSASVGDRVTITCRASETISNFLNWYQQKPGKAPKLLIYTTSSLQRGVPSRFSGSGSGTDFTLTISSLQPEDFATYCQQSYSVPWTFGGGTKVEIK

SEQ ID NO: 2220 - DNA, 318 bp, synthetic construct
  misc_feature 1..318: note = Synthetic
  source 1..318: mol_type = other DNA
gatattcaaatgactcaatctccttcttctttatctgcttctgttggtgatcgtgttactattacttgtcgtgcttctgaaactatttctaattttttaaattggtatcaacaaaaacctggtaaagctcctaaattattaatttatactacttcttctttacaacgtggtgttccttctcgtttttctggttctggttctggtactgattttactttaactatttcttctttacaacctgaagattttgctacttattgtcaacaatcttattctgttccttggacttttggtggtggtactaaagttgaaattaaa

SEQ ID NO: 2221 - protein, 6 aa, synthetic construct
  REGION 1..6: note = Synthetic
QNVGTN

SEQ ID NO: 2222 - skipped

SEQ ID NO: 2223 - protein, 8 aa, synthetic construct
  REGION 1..8: note = Synthetic
QQYDSYYT

SEQ ID NO: 2224 - protein, 106 aa, synthetic construct
  REGION 1..106: note = Synthetic
DIVMSQSQKFMSTSVGDRVSVTCKASQNVGTNVAWYQQKPGQSPKALIYSASYRYSGVPDRFTGSGSGTDFTLTISNVQSEDLAEYFCQQYDSYYTFGGGTKLEMK

SEQ ID NO: 2225 - DNA, 318 bp, synthetic construct
  misc_feature 1..318: note = Synthetic
  source 1..318: mol_type = other DNA
gatattgttatgtctcaatctcaaaaatttatgtctacttctgttggtgatcgtgtttctgttacttgtaaagcttctcaaaatgttggtactaatgttgcttggtatcaacaaaaacctggtcaatctcctaaagctttaatttattctgcttcttatcgttattctggtgttcctgatcgttttactggttctggttctggtactgattttactttaactatttctaatgttcaatctgaagatttagctgaatatttttgtcaacaatatgattcttattatacttttggtggtggtactaaattagaaatgaaa

SEQ ID NO: 2226 - protein, 11 aa, synthetic construct
  REGION 1..11: note = Synthetic
QSLVHSNGNTY

SEQ ID NO: 2227 - skipped

SEQ ID NO: 2228 - protein, 9 aa, synthetic construct
  REGION 1..9: note = Synthetic
WQGTHFPRT

SEQ ID NO: 2229 - protein, 112 aa, synthetic construct
  REGION 1..112: note = Synthetic
DVVMTQTPLSLPVSLGDQASISCRSSQSLVHSNGNTYLNWYLQKAGQSPKRLIYLVSKLDSGVPDRFTGSGSGTDFTLKISRVEAEDLGVYYCWQGTHFPRTFGGGTKLEIK

SEQ ID NO: 2230 - DNA, 336 bp, synthetic construct
  misc_feature 1..336: note = Synthetic
  source 1..336: mol_type = other DNA
gatgttgttatgactcaaactcctttatctttacctgtttctttaggtgatcaagcttctatttcttgtcgttcttctcaatctttagttcattctaatggtaatacttatttaaattggtatttacaaaaagctggtcaatctcctaaacgtttaatttatttagtttctaaattagattctggtgttcctgatcgttttactggttctggttctggtactgattttactttaaaaatttctcgtgttgaagctgaagatttaggtgtttattattgttggcaaggtactcattttcctcgtacttttggtggtggtactaaattagaaattaaa

SEQ ID NO: 2231 - protein, 6 aa, synthetic construct
  REGION 1..6: note = Synthetic
ETISNF

SEQ ID NO: 2232 - skipped

SEQ ID NO: 2233 - protein, 8 aa, synthetic construct
  REGION 1..8: note = Synthetic
QQSSVPWT

SEQ ID NO: 2234 - protein, 106 aa, synthetic construct; identical to SEQ ID NO: 529
  REGION 1..106: note = Synthetic

SEQ ID NO: 2235 - DNA, 318 bp, synthetic construct
  misc_feature 1..318: note = Synthetic
  source 1..318: mol_type = other DNA
gatattcaaatgactcaatctccttcttctttatctgcttctgttggtgatcgtgttactattacttgtcgtgcttctgaaactatttctaattttttaaattggtatcaacaaaaacctggtaaagctcctaaattattaatttatactacttcttctttacaacgtggtgttccttctcgtttttctggttctggttctggtactgattttactttaactatttcttctttacaacctgaagattttgctacttattattgtcaacaatcttctgttccttggacttttggtggtggtactaaagttgaaattaaa

SEQ ID NO: 2236 - protein, 6 aa, synthetic construct
  REGION 1..6: note = Synthetic
ETISNF

SEQ ID NO: 2237 - skipped

SEQ ID NO: 2238 - protein, 8 aa, synthetic construct
  REGION 1..8: note = Synthetic
QQSYSVPT

SEQ ID NO: 2239 - protein, 106 aa, synthetic construct
  REGION 1..106: note = Synthetic
DIQMTQSPSSLSASVGDRVTITCRASETISNFLNWYQQKPGKAPKLLIYTTSSLQRGVPSRFSGSGSGTDFTLTISSLQPEDFATYYCQQSYSVPTFGGGTKVEIK

SEQ ID NO: 2240 - DNA, 318 bp, synthetic construct
  misc_feature 1..318: note = Synthetic
  source 1..318: mol_type = other DNA
gatattcaaatgactcaatctccttcttctttatctgcttctgttggtgatcgtgttactattacttgtcgtgcttctgaaactatttctaattttttaaattggtatcaacaaaaacctggtaaagctcctaaattattaatttatactacttcttctttacaacgtggtgttccttctcgtttttctggttctggttctggtactgattttactttaactatttcttctttacaacctgaagattttgctacttattattgtcaacaatcttattctgttcctacttttggtggtggtactaaagttgaaattaaa

SEQ ID NO: 2241 - protein, 6 aa, synthetic construct
  REGION 1..6: note = Synthetic
QDVGTA

SEQ ID NO: 2242 - skipped

SEQ ID NO: 2243 - protein, 9 aa, synthetic construct
  REGION 1..9: note = Synthetic
QQYNTYPYT

SEQ ID NO: 2244 - protein, 107 aa, synthetic construct
  REGION 1..107: note = Synthetic
DIVMSQSHKFMSTSVGDRVSITCKASQDVGTAVAWYQQKPGQSPKLLIYWASTRHTGVPDRFTGSGSGTDFTLTISNVQSEDLAEYFCQQYNTYPYTFGGGTKLEMK

SEQ ID NO: 2245 - DNA, 321 bp, synthetic construct
  misc_feature 1..321: note = Synthetic
  source 1..321: mol_type = other DNA
gatattgttatgtctcaatctcataaatttatgtctacttctgttggtgatcgtgtttctattacttgtaaagcttctcaagatgttggtactgctgttgcttggtatcaacaaaaacctggtcaatctcctaaattattaatttattgggcttctactcgtcatactggtgttcctgatcgttttactggttctggttctggtactgattttactttaactatttctaatgttcaatctgaagatttagctgaatatttttgtcaacaatataatacttatccttatacttttggtggtggtactaaattagaaatgaaa

SEQ ID NO: 2246 - protein, 6 aa, synthetic construct
  REGION 1..6: note = Synthetic
TDIDDD

SEQ ID NO: 2247 - skipped

SEQ ID NO: 2248 - protein, 9 aa, synthetic construct
  REGION 1..9: note = Synthetic
LQSDNLPLT

SEQ ID NO: 2249 - protein, 107 aa, synthetic construct
  REGION 1..107: note = Synthetic
DTTVTQSPASLSMAIGEKVTIRCITSTDIDDDMNWYQQKPGEPPKLLISEGNTLRPGVPSRFSSSGYGTDFVFTIENMLSEDVADYYCLQSDNLPLTFGAGTKLEIK

SEQ ID NO: 2250 - DNA, 321 bp, synthetic construct
  misc_feature 1..321: note = Synthetic
  source 1..321: mol_type = other DNA
gatactactgttactcaatctcctgcttctttatctatggctattggtgaaaaagttactattcgttgtattacttctactgatattgatgatgatatgaattggtatcaacaaaaacctggtgaacctcctaaattattaatttctgaaggtaatactttacgtcctggtgttccttctcgtttttcttcttctggttatggtactgattttgtttttactattgaaaatatgttatctgaagatgttgctgattattattgtttacaatctgataatttacctttaacttttggtgctggtactaaattagaaattaaa

SEQ ID NO: 2251 - protein, 6 aa, synthetic construct
  REGION 1..6: note = Synthetic
QNVGTN

SEQ ID NO: 2252 - skipped

SEQ ID NO: 2253 - protein, 9 aa, synthetic construct
  REGION 1..9: note = Synthetic
QQCNSYPWT

SEQ ID NO: 2254 - protein, 107 aa, synthetic construct
  REGION 1..107: note = Synthetic
DIVMSQSQKFMSTSVGDRVSVTCKASQNVGTNVAWYQQKPGQSPKALIYSASYRYSGVPDRFTGSGSGTDFTLTISNVQSEDLAEYFCQQCNSYPWTFGGGTKLEIK

SEQ ID NO: 2255 - DNA, 321 bp, synthetic construct
  misc_feature 1..321: note = Synthetic
  source 1..321: mol_type = other DNA
gatattgttatgtctcaatctcaaaaatttatgtctacttctgttggtgatcgtgtttctgttacttgtaaagcttctcaaaatgttggtactaatgttgcttggtatcaacaaaaacctggtcaatctcctaaagctttaatttattctgcttcttatcgttattctggtgttcctgatcgttttactggttctggttctggtactgattttactttaactatttctaatgttcaatctgaagatttagctgaatatttttgtcaacaatgtaattcttatccttggacttttggtggtggtactaaattagaaattaaa

SEQ ID NO: 2256 - protein, 6 aa, synthetic construct
  REGION 1..6: note = Synthetic
QDVGTA

SEQ ID NO: 2257 - skipped

SEQ ID NO: 2258 - protein, 10 aa, synthetic construct
  REGION 1..10: note = Synthetic
QQYNSYPQYT

SEQ ID NO: 2259 - protein, 108 aa, synthetic construct; identical to SEQ ID NO: 519
  REGION 1..108: note = Synthetic

SEQ ID NO: 2260 - DNA, 324 bp, synthetic construct
  misc_feature 1..324: note = Synthetic
  source 1..324: mol_type = other DNA
gatattgttatgtctcaatctcataaatttatgtctacttctgttggtgatcgtgtttctattacttgtaaagcttctcaagatgttggtactgctgttgcttggtatcaacaaaaacctggtcaatctcctaaattattaatttattgggcttctactcgtcatactggtgttcctgatcgttttactggttctggttctggtactgattttactttaactatttctaatgttcaatctgaagatttagctgaatatttttgtcaacaatataattcttatcctcaatatacttttggtggtggtactaaattagaaattaaa

SEQ ID NO: 2261 - protein, 6 aa, synthetic construct
  REGION 1..6: note = Synthetic
QDVGTA

SEQ ID NO: 2262 - skipped

SEQ ID NO: 2263 - protein, 8 aa, synthetic construct
  REGION 1..8: note = Synthetic
HQYLSSRT

SEQ ID NO: 2264 - protein, 106 aa, synthetic construct
  REGION 1..106: note = Synthetic
DIVMSQSHKFMSTSVGDRVSITCKASQDVGTAVAWYQQKPGQSPKALIYSASYRYSGVPDRFTGSGSGTDFTLTISSVQAEDLAVYYCHQYLSSRTFGGGTKLEIK

SEQ ID NO: 2265 - DNA, 318 bp, synthetic construct
  misc_feature 1..318: note = Synthetic
  source 1..318: mol_type = other DNA
gatattgttatgtctcaatctcataaatttatgtctacttctgttggtgatcgtgtttctattacttgtaaagcttctcaagatgttggtactgctgttgcttggtatcaacaaaaacctggtcaatctcctaaagctttaatttattctgcttcttatcgttattctggtgttcctgatcgttttactggttctggttctggtactgattttactttaactatttcttctgttcaagctgaagatttagctgtttattattgtcatcaatatttatcttctcgtacttttggtggtggtactaaattagaaattaaa

SEQ ID NO: 2266 - protein, 6 aa, synthetic construct
  REGION 1..6: note = Synthetic
QDVSTA

SEQ ID NO: 2267 - skipped

SEQ ID NO: 2268 - protein, 9 aa, synthetic construct
  REGION 1..9: note = Synthetic
QQYYSYPRT

SEQ ID NO: 2269 - protein, 107 aa, synthetic construct
  REGION 1..107: note = Synthetic
DVQMTQSHKFMSTSVGDRVSITCKASQDVSTAVAWYQQKPGQSPKLLIYWASTRESGVPDRFTGSGSGTDFTLTISSVKAEDLAVYYCQQYYSYPRTFGGGTKLEIK

SEQ ID NO: 2270 - DNA, 321 bp, synthetic construct
  misc_feature 1..321: note = Synthetic
  source 1..321: mol_type = other DNA
gatgttcaaatgactcaatctcataaatttatgtctacttctgttggtgatcgtgtttctattacttgtaaagcttctcaagatgtttctactgctgttgcttggtatcaacaaaaacctggtcaatctcctaaattattaatttattgggcttctactcgtgaatctggtgttcctgatcgttttactggttctggttctggtactgattttactttaactatttcttctgttaaagctgaagatttagctgtttattattgtcaacaatattattcttatcctcgtacttttggtggtggtactaaattagaaattaaa

SEQ ID NO: 2271 - protein, 5 aa, synthetic construct
  REGION 1..5: note = Synthetic
SSVSY

SEQ ID NO: 2272 - skipped

SEQ ID NO: 2273 - protein, 7 aa, synthetic construct
  REGION 1..7: note = Synthetic
HQWSSGT

SEQ ID NO: 2274 - protein, 104 aa, synthetic construct
  REGION 1..104: note = Synthetic
DIVMTQSPAIMSASPGEKVTMTCSASSSVSYMHWYQQKSGTSPKRWIYDTSKLASGVPSRFSGSGSGTFYSLTISSVEAEDAADYYCHQWSSGTFGGGTKLEIK

SEQ ID NO: 2275 - DNA, 312 bp, synthetic construct
  misc_feature 1..312: note = Synthetic
  source 1..312: mol_type = other DNA
gatattgttatgactcaatctcctgctattatgtctgcttctcctggtgaaaaagttactatgacttgttctgcttcttcttctgtttcttatatgcattggtatcaacaaaaatctggtacttctcctaaacgttggatttatgatacttctaaattagcttctggtgttccttctcgtttttctggttctggttctggtactttttattctttaactatttcttctgttgaagctgaagatgctgctgattattattgtcatcaatggtcttctggtacttttggtggtggtactaaattagaaattaaa

SEQ ID NO: 2276 - protein, 5 aa, synthetic construct
  REGION 1..5: note = Synthetic
SSVSY

SEQ ID NO: 2277 - skipped

SEQ ID NO: 2278 - protein, 9 aa, synthetic construct
  REGION 1..9: note = Synthetic
QQWSSYPYT

SEQ ID NO: 2279 - protein, 106 aa, synthetic construct
  REGION 1..106: note = Synthetic
DIVLTQSPAIMSASPGEKVTMTCSASSSVSYMHWYQQKSGTSPKRWIYDTSKLASGVPARFSGSGSGTSYSLTISSMEAEDAATYYCQQWSSYPYTFGGGTKLEIK

SEQ ID NO: 2280 - DNA, 318 bp, synthetic construct
  misc_feature 1..318: note = Synthetic
  source 1..318: mol_type = other DNA
gatattgttttaactcaatctcctgctattatgtctgcttctcctggtgaaaaagttactatgacttgttctgcttcttcttctgtttcttatatgcattggtatcaacaaaaatctggtacttctcctaaacgttggatttatgatacttctaaattagcttctggtgttcctgctcgtttttctggttctggttctggtacttcttattctttaactatttcttctatggaagctgaagatgctgctacttattattgtcaacaatggtcttcttatccttatacttttggtggtggtactaaattagaaattaaa

SEQ ID NO: 2281 - protein, 5 aa, synthetic construct
  REGION 1..5: note = Synthetic
SSVIY

SEQ ID NO: 2282 - skipped

SEQ ID NO: 2283 - protein, 9 aa, synthetic construct
  REGION 1..9: note = Synthetic
QQKSTYPWT

SEQ ID NO: 2284 - protein, 106 aa, synthetic construct
  REGION 1..106: note = Synthetic
DIVLTQSPAIMSASPGEKVTITCSASSSVIYIHWFQQKPGTSPKLWIYSTSNLASGVPARFSGNGSGTSYSLTISRMEAEDAVTYYCQQKSTYPWTFGGGTKLEIK

SEQ ID NO: 2285 - DNA, 318 bp, synthetic construct
  misc_feature 1..318: note = Synthetic
  source 1..318: mol_type = other DNA
gatattgttttaactcaatctcctgctattatgtctgcttctcctggtgaaaaagttactattacttgttctgcttcttcttctgttatttatattcattggtttcaacaaaaacctggtacttctcctaaattatggatttattctacttctaatttagcttctggtgttcctgctcgtttttctggtaatggttctggtacttcttattctttaactatttctcgtatggaagctgaagatgctgttacttattattgtcaacaaaaatctacttatccttggacttttggtggtggtactaaattagaaattaaa

SEQ ID NO: 2286 - protein, 5 aa, synthetic construct
  REGION 1..5: note = Synthetic
SSVSY

SEQ ID NO: 2287 - skipped

SEQ ID NO: 2288 - protein, 9 aa, synthetic construct
  REGION 1..9: note = Synthetic
FQGSGYPLT

SEQ ID NO: 2289 - protein, 106 aa, synthetic construct
  REGION 1..106: note = Synthetic
DIVLTQSPAIMSASPGEKVTMTCSASSSVSYMHWYQQKSGTSPKRWIYDTSKLASGVPARFSGSGSGNSYSLTISSMEAEDVATYYCFQGSGYPLTFGGGTKLEIK

SEQ ID NO: 2290 - DNA, 318 bp, synthetic construct
  misc_feature 1..318: note = Synthetic
  source 1..318: mol_type = other DNA
gatattgttttaactcaatctcctgctattatgtctgcttctcctggtgaaaaagttactatgacttgttctgcttcttcttctgtttcttatatgcattggtatcaacaaaaatctggtacttctcctaaacgttggatttatgatacttctaaattagcttctggtgttcctgctcgtttttctggttctggttctggtaattcttattctttaactatttcttctatggaagctgaagatgttgctacttattattgttttcaaggttctggttatcctttaacttttggtggtggtactaaattagaaattaaa

SEQ ID NO: 2291 - protein, 6 aa, synthetic construct
  REGION 1..6: note = Synthetic
GDIRNY

SEQ ID NO: 2292 - skipped

SEQ ID NO: 2293 - protein, 9 aa, synthetic construct
  REGION 1..9: note = Synthetic
QHHYGTPPT

SEQ ID NO: 2294 - protein, 107 aa, synthetic construct; identical to SEQ ID NO: 439
  REGION 1..107: note = Synthetic

SEQ ID NO: 2295 - DNA, 321 bp, synthetic construct
  misc_feature 1..321: note = Synthetic
  source 1..321: mol_type = other DNA
gatattcaaatgactcaatctcctgcttctttatctgcttctgttggtgaaactgttactattacttgtcgtgcttctggtgatattcgtaattatttaatttggtatcaacaaaaacaaggtaaatctcctcaagttttagtttataatgctaaaactttagctgatggtgttccttctcgtttttctggttctggttctggtactcaattttctttaaaaattaattctttacaacctgaagattttggttcttattattgtcaacatcattatggtactcctcctacttttggtggtggtactaaattagaaattaaa

SEQ ID NO: 2296 - protein, 6 aa, synthetic construct
  REGION 1..6: note = Synthetic
QDINKY

SEQ ID NO: 2297 - skipped

SEQ ID NO: 2298 - protein, 9 aa, synthetic construct
  REGION 1..9: note = Synthetic
LQYDNLLWT

SEQ ID NO: 2299 - protein, 107 aa, synthetic construct
  REGION 1..107: note = Synthetic
DIQMTQSPSSLSASLGGKVTITCKASQDINKYIAWYQHKPGKGPRLLIHYTSTLQPGIPSRFSGSGSGRDYSFSISNLEPEDIATYYCLQYDNLLWTFGGGTKLEMK

SEQ ID NO: 2300 - DNA, 321 bp, synthetic construct
  misc_feature 1..321: note = Synthetic
  source 1..321: mol_type = other DNA
gatattcaaatgactcaatctccttcttctttatctgcttctttaggtggtaaagttactattacttgtaaagcttctcaagatattaataaatatattgcttggtatcaacataaacctggtaaaggtcctcgtttattaattcattatacttctactttacaacctggtattccttctcgtttttctggttctggttctggtcgtgattattctttttctatttctaatttagaacctgaagatattgctacttattattgtttacaatatgataatttattatggacttttggtggtggtactaaattagaaatgaaa

SEQ ID NO: 2301 - protein, 6 aa, synthetic construct
  REGION 1..6: note = Synthetic
QDINKF

SEQ ID NO: 2302 - skipped

SEQ ID NO: 2303 - protein, 8 aa, synthetic construct
  REGION 1..8: note = Synthetic
LQYDTLWT

SEQ ID NO: 2304 - protein, 106 aa, synthetic construct
  REGION 1..106: note = Synthetic
DIQMTQSPSSLSASLGGKVTITCKASQDINKFITWYQHKPGKGPRLLIHYTSTLQPGIPSRFSGSGSGRDYSFSISNLEPEDIATYYCLQYDTLWTFGGGTKLEMK

SEQ ID NO: 2305 - DNA, 318 bp, synthetic construct
  misc_feature 1..318: note = Synthetic
  source 1..318: mol_type = other DNA
gatattcaaatgactcaatctccttcttctttatctgcttctttaggtggtaaagttactattacttgtaaagcttctcaagatattaataaatttattacttggtatcaacataaacctggtaaaggtcctcgtttattaattcattatacttctactttacaacctggtattccttctcgtttttctggttctggttctggtcgtgattattctttttctatttctaatttagaacctgaagatattgctacttattattgtttacaatatgatactttatggacttttggtggtggtactaaattagaaatgaaa

SEQ ID NO: 2306 - protein, 6 aa, synthetic construct
  REGION 1..6: note = Synthetic
QDVGTA

SEQ ID NO: 2307 - skipped

SEQ ID NO: 2308 - protein, 9 aa, synthetic construct
  REGION 1..9: note = Synthetic
QQHYSPPYT

SEQ ID NO: 2309 - protein, 107 aa, synthetic construct; identical to SEQ ID NO: 509
  REGION 1..107: note = Synthetic

SEQ ID NO: 2310 - DNA, 321 bp, synthetic construct
  misc_feature 1..321: note = Synthetic
  source 1..321: mol_type = other DNA
gatgttgttatgactcaatctcataaatttatgtctacttctgttggtgatcgtgtttctattacttgtaaagcttctcaagatgttggtactgctgttgcttggtatcaacaaaaacctggtcaatctcctaaagctttaatttattgggcttctactcgtcatactggtgttcctgatcgttttactggttctggttctggtactgattttacttttactatttcttctgttcaagctgaagatttagctgtttattattgtcaacaacattattctcctccttatacttttggtggtggtactaaattagaaatgaaa

SEQ ID NO: 2311 - protein, 10 aa, synthetic construct
  REGION 1..10: note = Synthetic
TSNIGSGNNY

SEQ ID NO: 2312 - skipped

SEQ ID NO: 2313 - protein, 9 aa, synthetic construct
  REGION 1..9: note = Synthetic
QQYHTYPFT

SEQ ID NO: 2314 - protein, 111 aa, synthetic construct; identical to SEQ ID NO: 499
  REGION 1..111: note = Synthetic

SEQ ID NO: 2315 - DNA, 333 bp, synthetic construct
  misc_feature 1..333: note = Synthetic
  source 1..333: mol_type = other DNA
gatattcaattaactcaatctccttcttctttatctgcttctgttggtgatcgtgttactattacttgtaaagcttctacttctaatattggttctggtaataattatatgaattggtatcaacaaaaacctggtaaagctcctaaattattaatttatggtgcttctaatttagaatctggtgttccttctcgtttttctggttctggttctggtactgattttactttaactatttcttctttacaacctgaagattttgctacttattattgtcaacaatatcatacttatccttttacttttggtcaaggtactaaattagaaattaaa

SEQ ID NO: 2316 - protein, 10 aa, synthetic construct
  REGION 1..10: note = Synthetic
QSVDSDGDSY

SEQ ID NO: 2317 - skipped

SEQ ID NO: 2318 - protein, 9 aa, synthetic construct
  REGION 1..9: note = Synthetic
QQYHSHPYT

SEQ ID NO: 2319 - protein, 111 aa, synthetic construct; identical to SEQ ID NO: 459
  REGION 1..111: note = Synthetic

SEQ ID NO: 2320 - DNA, 333 bp, synthetic construct
  misc_feature 1..333: note = Synthetic
  source 1..333: mol_type = other DNA
gatattcaattaactcaatctccttcttctttatctgcttctgttggtgatcgtgttactattacttgtaaagcttctcaatctgttgattctgatggtgattcttatatgaattggtatcaacaaaaacctggtaaagctcctaaattattaatttatggtgcttctaatttagaatctggtgttccttctcgtttttctggttctggttctggtactgattttactttaactatttcttctttacaacctgaagattttgctacttattattgtcaacaatatcattctcatccttatacttttggtcaaggtactaaattagaaattaaa

SEQ ID NO: 2321 - protein, 10 aa, synthetic construct
  REGION 1..10: note = Synthetic
QSVDSDGDSY

SEQ ID NO: 2322 - skipped

SEQ ID NO: 2323 - protein, 9 aa, synthetic construct
  REGION 1..9: note = Synthetic
QQLNIYPFT

SEQ ID NO: 2324 - protein, 111 aa, synthetic construct
  REGION 1..111: note = Synthetic
DIQLTQSPSSLSASVGDRVTITCKASQSVDSDGDSYMNWYQQKPGKAPKLLIYGASNLESGVPSRFSGSGSGTDFTLTISSLQPEDFATYYCQQLNIYPFTFGQGTKLEIK

SEQ ID NO: 2325 - DNA, 333 bp, synthetic construct
  misc_feature 1..333: note = Synthetic
  source 1..333: mol_type = other DNA
gatattcaattaactcaatctccttcttctttatctgcttctgttggtgatcgtgttactattacttgtaaagcttctcaatctgttgattctgatggtgattcttatatgaattggtatcaacaaaaacctggtaaagctcctaaattattaatttatggtgcttctaatttagaatctggtgttccttctcgtttttctggttctggttctggtactgattttactttaactatttcttctttacaacctgaagattttgctacttattattgtcaacaattaaatatttatccttttacttttggtcaaggtactaaattagaaattaaa

SEQ ID NO: 2326 - protein, 10 aa, synthetic construct
  REGION 1..10: note = Synthetic
TVSHVGSYNP

SEQ ID NO: 2327 - skipped

SEQ ID NO: 2328 - protein, 9 aa, synthetic construct
  REGION 1..9: note = Synthetic
QQLNNYPVT

SEQ ID NO: 2329 - protein, 111 aa, synthetic construct
  REGION 1..111: note = Synthetic
DIQLTQSPSSLSASVGDRVTITCKASTVSHVGSYNPMNWYQHKPGKAPKLLIYGASNLESGVPSRFSGSGSGTDFTLTISSLQPEDFATYYCQQLNNYPVTFGQGTKLEIK

SEQ ID NO: 2330 - DNA, 333 bp, synthetic construct
  misc_feature 1..333: note = Synthetic
  source 1..333: mol_type = other DNA
gatattcaattaactcaatctccttcttctttatctgcttctgttggtgatcgtgttactattacttgtaaagcttctactgtttctcatgttggttcttataatcctatgaattggtatcaacataaacctggtaaagctcctaaattattaatttatggtgcttctaatttagaatctggtgttccttctcgtttttctggttctggttctggtactgattttactttaactatttcttctttacaacctgaagattttgctacttattattgtcaacaattaaataattatcctgttacttttggtcaaggtactaaattagaaattaaa

SEQ ID NO: 2331 - protein, 6 aa, synthetic construct
  REGION 1..6: note = Synthetic
HIISSY

SEQ ID NO: 2332 - skipped

SEQ ID NO: 2333 - protein, 9 aa, synthetic construct
  REGION 1..9: note = Synthetic
QQSYSTPPT

SEQ ID NO: 2334 - protein, 107 aa, synthetic construct
  REGION 1..107: note = Synthetic
DIQMTQSPSSLSASVGDRVTITCRASHIISSYLNWYQQKPGKAPKLLIYAASSLQSGVPSRFSGSGSGTDFTLTISSLQPEDFATYYCQQSYSTPPTFGQGTKVEIK

SEQ ID NO: 2335 - DNA, 321 bp, synthetic construct
  misc_feature 1..321: note = Synthetic
  source 1..321: mol_type = other DNA
gatattcaaatgactcaatctccttcttctttatctgcttctgttggtgatcgtgttactattacttgtcgtgcttctcatattatttcttcttatttaaattggtatcaacaaaaacctggtaaagctcctaaattattaatttatgctgcttcttctttacaatctggtgttccttctcgtttttctggttctggttctggtactgattttactttaactatttcttctttacaacctgaagattttgctacttattattgtcaacaatcttattctactcctcctacttttggtcaaggtactaaagttgaaattaaa

SEQ ID NO: 2336 - protein, 10 aa, synthetic construct
  REGION 1..10: note = Synthetic
ATSSDVAYYH

SEQ ID NO: 2337 - skipped

SEQ ID NO: 2338 - protein, 9 aa, synthetic construct
  REGION 1..9: note = Synthetic
QEHHSYPYT

SEQ ID NO: 2339 - protein, 111 aa, synthetic construct
  REGION 1..111: note = Synthetic
DIQLTQSPSSLSASVGDRVTITCKASATSSDVAYYHMNWYQQKPGKAPKLLIYGASNLESGVPSRFSGSGSGTDFTLTISSLQPEDFATYYCQEHHSYPYTFGQGTKLEIK

SEQ ID NO: 2340 - DNA, 333 bp, synthetic construct
  misc_feature 1..333: note = Synthetic
  source 1..333: mol_type = other DNA
gatattcaattaactcaatctccttcttctttatctgcttctgttggtgatcgtgttactattacttgtaaagcttctgctacttcttctgatgttgcttattatcatatgaattggtatcaacaaaaacctggtaaagctcctaaattattaatttatggtgcttctaatttagaatctggtgttccttctcgtttttctggttctggttctggtactgattttactttaactatttcttctttacaacctgaagattttgctacttattattgtcaagaacatcattcttatccttatacttttggtcaaggtactaaattagaaattaaa

SEQ ID NO: 2341 - protein, 11 aa, synthetic construct
  REGION 1..11: note = Synthetic
PQYPGSEILWQ

SEQ ID NO: 2342 - protein, 11 aa, synthetic construct
  REGION 1..11: note = Synthetic
YPRGSKPEDAN

SEQ ID NO: 2343 - protein, 21 aa, synthetic construct
  REGION 1..21: note = Synthetic
QDGNEEMGGITQTPYKVSISG

SEQ ID NO: 2344 - protein, 15 aa, synthetic construct
  REGION 1..15: note = Synthetic
YRCNGTDIYKDKEST

SEQ ID NO: 2345 - protein, 31 aa, synthetic construct
  REGION 1..31: note = Synthetic
SPQYPGSEILWQKWGNKKVSYPRGSKPEDAN

SEQ ID NO: 2346 - protein, 21 aa, synthetic construct
  REGION 1..21: note = Synthetic
QDGNEEMGGITQTPYKVSGSG

SEQ ID NO: 2347 - protein, 15 aa, synthetic construct
  REGION 1..15: note = Synthetic
YRSNGTDIYKDKEST

SEQ ID NO: 2348 - protein, 120 aa, synthetic construct; identical to SEQ ID NO: 84
  REGION 1..120: note = Synthetic

SEQ ID NO: 2349 - protein, 107 aa, synthetic construct; identical to SEQ ID NO: 9
  REGION 1..107: note = Synthetic

SEQ ID NO: 2350 - protein, 125 aa, synthetic construct; identical to SEQ ID NO: 1084
  REGION 1..125: note = Synthetic

SEQ ID NO: 2351 - protein, 110 aa, synthetic construct; identical to SEQ ID NO: 669
  REGION 1..110: note = Synthetic
